(19) United States
(12) Patent Application Publication
(10) Pub. No.: US 2021/0228531 A1
(43) Pub. Date: Jul. 29, 2021

(54) TARGETED TREATMENT OF AUTISM SPECTRUM DISORDER AND OTHER NEUROLOGICAL OR PSYCHIATRIC DISORDERS

(71) Applicants: Tufts Medical Center, Inc., Boston, MA (US); Auttx, LLC, Newton, MA (US)

(72) Inventors: Isabelle Draper, Andover, MA (US); Alan S. Kopin, Wellesley, MA (US); Donna Slonim, Woburn, MA (US)

(21) Appl. No.: 15/734,843

(22) PCT Filed: Jun. 5, 2019
(86) PCT No.: PCT/US19/35655

§ 371 Date: Dec. 3, 2020

Related U.S. Application Data
(60) Provisional application No. 62/681,086, filed on Jun. 5, 2018.

(51) Int. Cl. A61K 31/341; A61K 31/122; A61P 25/28

(52) U.S. Cl. CPC A61K 31/341; A61P 25/28; A61K 31/122

(57) ABSTRACT

Disclosed are methods of treating autism spectrum disorder (ASD) by administering a therapeutically effective amount of an isoprenoid antibiotic to subjects identified with a splicing defect in an ASD associated gene. The method of treating a subject with a neurological disease is carried out by identifying the subject comprising a splicing defect in an autism spectrum disorder (ASD)-associated gene, the target gene being characterized as having an hnRNP L binding site. The subject is treated by administering a spliceopathy rescue agent to repair the splicing defect. Also disclosed are methods of upregulating hnRNP L and hnRNP L targets by administering a therapeutically effective amount of an isoprenoid antibiotic. Methods of screening compounds for use in treating autism spectrum disorder (ASD) are also described.

### RELATED APPLICATIONS

[0001] This application claims benefit of and priority to provisional patent application U.S. Ser. No. 62/681,086, filed on Jun. 5, 2018; the contents of which are hereby incorporated by reference in its entirety.

### FIELD OF THE INVENTION

[0002] The present invention relates to treatment of neurological disorders, such as autism spectrum disorder (ASD) and intellectual disability.

### BACKGROUND

[0003] There is a high incidence of autism spectrum disorder (ASD) in the general population (˜1 in 68 children). Very few therapeutics have effects on the primary symptoms of autism spectrum disorder (and correlated neurological conditions e.g. attention-deficit/hyperactivity disorder (ADHD), epilepsy, mental retardation, intellectual disability), including those typically used for neuropsychiatric disorders. There exists a need for safe compounds for the treatment of autism spectrum disorder.

### SUMMARY OF THE INVENTION

[0004] The invention provides compounds, compositions, and methods for the treatment, e.g., reduction of symptoms, of autism spectrum disorder (ASD) as well as other neurological and/or psychological disorders or conditions.

[0005] The method includes the steps of identifying a subject having a splicing defect in an autism spectrum disorder (ASD)-associated gene, wherein the target gene is characterized as having an hnRNP L (heterogeneous nuclear ribonucleoprotein L) binding site, and administering to the subject a spliceopathy rescue agent to repair the splicing defect. In this method, the target gene does not include AB11, ACSS2, AGAP3, AGXT2L2, APP, ATP2B1, ATP2B4, BIN1, BPTF/FALZ, C12orf41/KANSL2, C14orf133/VIPAR, DMD, DTNA, E1F2C2, EPB41L2, FMNL2, GARNL1/RALGAPA1, ITSN2, KIAA1217, LRRFIP1, MAPT, MAX, MEF2A, NCAM1, PALLD, PDLIM7, PPP2R5C, PTPN3, RPGR, RRN3, SAD1/BRSK2, SAMD4A, SEMA6D, SLC25A3, SLC39A9, SMTN, SORBS1, STXBP5, SVIL, TPM1, TPM3, TRIM66, TTN, VPS29, XPNPEP1, or ZMYND8 (U.S. Pat. No. 9,662,314, contents of which are hereby incorporated by reference in its entirety). Exemplary neurological and psychiatric disorders include, but are not limited to, autism, autism spectrum disorder, intellectual disability, attention-deficit/hyperactivity disorder (ADHD), dyslexia, epilepsy, bipolar disorder, Alzheimer's disease, Parkinson's disease, depression and schizophrenia.

[0006] The splicing defect or spliceopathy may be detected, e.g., using whole genome sequencing and/or identification of aberrant splice variants in a sample of RNA or corresponding cDNA. Examples of such splicing defects or the spliceopathies include, but are not limited to, exon (all or part) skipping, in-frame deletion, exon (all or part) inclusion, intron (all or part) retention, or the usage of cryptic 5′ and 3′ splice sites. Additionally, the splicing defect or the spliceopathy may also include altered relative abundance of alternatively splice variants. For example, the ratio of a predominan brain splice variant vs. a minor brain splice variant may be in an abnormal value/amount. In another example, the ratio of a fetal splice variant vs. an adult splice variant may be in an abnormal value/amount or in an abnormal ratio. In another example, tissue-specific normal variants may be expressed in inappropriate tissues, such as muscle-specific variants expressed in brain. Such non-neuronal splice variants expressed in neuronal tissue indicate an abnormality that is indicative of ASD or another neurological disorder. Detection of the spliceopathies (aberrant splicing) in subject tissues or cells can be achieved using minimally invasive procedures. For example, defects may be detected in the RNA extracted from the patient's peripheral blood lymphocytes, using cDNA-SSCP-HD analysis (see, e.g., Ars et al., Mutations affecting mRNA splicing are the most common molecular defects in patients with neurofibromatosis type 1., Hum Mol Genet. 2000, 22;9(2):237-47).

[0007] A spliceopathy rescue agent may be defined as an agent that restores or compensates functional defects caused by splicing defects or spliceopathies. For example, a spliceopathy rescue agent may restore the altered splicing and thus inhibit expression of abnormal mRNA variants or protein isoforms and/or improve expression of normal forms of mRNA or protein. A spliceopathy rescue agent may also restore the tissue specificity, e.g., tissue specific expression, of the target gene. Alternatively, a spliceopathy rescue agent may not directly influence the altered splicing, but compensate a defective function caused by the altered splicing.

[0008] Examples of a spliceopathy rescue agent that alters a gene splicing profile include, but are not limited to, those documented in the literature (e.g., Martinez-Montiel et al., Alternative Splicing as a Target for Cancer Treatment, Int. J. Mol. Sci. 2018, 19:545; Bates et al., Pharmacology of Modulators of Alternative Splicing, Pharmacol Rev 2017, 69:63-79, which are incorporated herein by reference in their entirety). Non-limiting exemplary spliceopathy rescue agents include a small molecule, a nucleic acid, an enzyme, a protein, a polypeptide, an antibody or a functional fragment thereof, an aptamer, a RNA-based compound (e.g., a small interfering RNA, a microRNA and a small hairpin RNA), an antisense nucleic acid, a PNA, a CRISPR/Cas construct and the like, whether these are natural or synthetic.

[0009] An exemplary small molecule includes ascochlorin, an ascochlorin derivative, or an ascochlorin analogue. An ascochlorin derivative may include a chemical compound derived from ascochlorin as a product of a chemical reaction (e.g., Cylindrol A5, 4-O-methylascochhlorin (MAC)). By comparison, an ascochlorin analog may be structurally similar to ascochlorin. For instance, ascofuranone, an ascofuranone derivative or an ascofuranone analog are non-limiting examples of ascochlorin analogues. Exemplary ascochlorin derivative compounds include an ascochlorin glycoside Vertihemipterin A, a aglycone thereof, 4′,5′-dihydro-4′-hydroxyascochlorin, 8′-hydroxyascochlorin; LL-Z1272delta, 8′,9′-dehydroascochlorin, ascofuranone, ascofuranol, AS-6, Cylindrol A5, 4-O-methylascochhlorin (MAC), or colletochlorin.

[0010] Particularly preferred are compounds characterized as having minimal or absence of clinical toxicity. For example, MAC has been tested in clinical trials (see, for example, U.S. Pat. No. 3,995,061, 1976) and was well tolerated. The ascochlorin derivatives 4-O-methyl-ascochlorin (MAC), and 4-O-ethyl-ascochlorin display low toxicity as assessed by high LD50 after IP or oral administration (see, for example, Hosokawa T et al., U.S. Pat. No. 3,995,061, 1976). Suitable compound include 4-O-methylascochlorin (MAC), 4-O-ethylascochlorin, and other derivatives/analogs, including AS-6, ascofuranone (AF) and AF-like analogs/ubiquinol mimics isolated via novel routes of synthesis using structure activity relationships (SAR) (e.g., AF-like analogues 18 and 19, as described in West et al., Eur J Med Chem. 2017 Dec. 1; 141:676-689), ascochlorin glycoside Vertihemipterin A, a aglycone thereof, 4′,5′-dihydro-4′-hydroxyascochlorin, 8′-hydroxyascochlorin; LL-Z1272delta, 8′,9′-dehydroascochlorin. Other suitable compounds include cefacetrile, cefotaxime, ciproflaxin, netilimicine or a fluoroquinolone/quinolone compound (see, for example, Kang et al., J Proteome Res. 2006 October; 5(10):2620-31).

[0011] The hnRNP L binding site may be located within an intron, or within the exon, adjacent to a site of alternative splicing of the target ASD-associated gene in a subject having a splicing defect. More specifically, the gene may have an hnRNP L binding site within 5000, 4000, 3000, 2000, 1000, 500, 400, 300, 200, 100 or 50 base pairs of a site of alternative splicing. Further, the gene may have an hnRNP L binding site within 4000, 3000, 2000, 1000, 900, 800, 700, 600, 500, 400, 300, 200, 100 or 50 base pairs of an RBFox1/A2BP1 binding site. RBFox1 is a splicing factor that has been implicated in ASD (Bill, B. et al., Int Rev Neurobiol. 2013, 113: 251-267). RBFox1 is also a candidate target of hnRNP L (see, e.g., Table 2). In another example, the gene may have an hnRNP L binding site within 4000, 3000, 2000, 1000, 900, 800, 700, 600, 500, 400, 300, 200, 100 or 50 base pairs of the binding site of a splicing factor which is partner of hnRNP L in the splicing complex. For example, aberrant splicing of FOX1 targets (due to a mutation in FOX1, leading in turn to ASD) is also rescued by hnRNP L if the targets are downstream of both splicing factors.

[0012] Exemplary target genes in which the subject to be treated has a splicing defect include NF1 gene, TSC1 or TSC2 gene. For example, the subject may be from a cohort with neurofibromatosis having a splicing defect in a NF1 gene or a cohort with tuberous sclerosis having a splicing defect in a TSC1 or TSC2 gene. (Smith and Sadee, Synaptic signaling and aberrant RNA splicing in autism spectrum disorders, Frontiers in Neuroscience, 2011). Similarly, cDNA screens of NF-1 patients revealed that splice-site mutations constitute the most common type of mutation (28-50%).

[0013] The splicing defect may be in a target gene associated with ASD within the SHANK (SH3 and multiple ankyrin repeat domains 3)/TSC (Tuberous sclerosis)/mTOR (mammalian target of rapamycin)/ERK (Extracellular Receptor Kinase) signaling pathway. The SHANK/TSC/mTOR/ERK signaling pathway is one mechanism for controlling cell survival, differentiation, proliferation, metabolism, and motility in response to extracellular cues. The components of the SHANK/TSC/mTOR/ERK signaling pathway include, but are not limited to, 4E-BP, Akt, Ampakine, AMPAR, APOER2, β-catenin, BDNF, CADPS2, CaMKI, CDCS, CHD8, CNTNAP2, CREB, DRD2, Dv11, elF4E, Engrailed, ERK, FMRP, Frizzled, GABAR, GKAP, GSK-3β, HGF, Homer, IGF-1, IGFR, IL1RAPL1, JNK, K+ channel, MeCP2, MEK, MET, mGluR, mTOR, NF1, NLGN, NMDAR, NRX, OPHN1, OXT, OXTR, PDS-95, PI3K, PICK1, PKA, PKC, PTEN, PTPS, Raf, Ras, Reelin, RhoGAP2, S6K, Scnla, Shank, SynGAP, TM4SF2, TrkB, TSC1, TSC2, VLDLR and Wnt. (Goldani et al., Frontiers in Psychiatry, 2014, 5:100).

[0014] Several components of the SHANK/TSC/mTOR/ERK signaling pathway are associated with ASD (FIGS. 2, 8 and 9).

[0015] Preferably, exemplary target genes include, but are not limited to, genes bearing hnRNP L binding sites within the SHANK-TSC-mTOR-ERK ASD disease module, e.g., NRXN1, NRXN2, NRXN3, NLGN3, NLGN4X, NLGN4Y, SHANK2, SHANK3, NF1, TSC1, TSC2, MTOR, FMR1, EIF4E, CACNA1C, GRIN1, GRM1, DRD2, MAPK3, GSK3B, GABRB3, SCN1A, MET, HRAS, VLDLR, AKAP9 and CADPS2. The aforementioned splicing defect may be in genes bearing hnRNP L binding sites that also comprise the more focused SHANK-TSC ASD disease module. Examples of such genes include, but are not limited to, CADPS2, NRXN1, NRXN2, NRXN3, NLGN3, NLGN4X, NLGN4Y, SHANK2, SHANK3, NF1, TSC1, TSC2, FMR1, EIF4E, CACNA1C, MTOR, GRIN1 and GRM1.

[0016] Alternatively, the subject to be treated has a splicing defect in any ASD-associated genes that is a target of hnRNP L as described herein. For example, the subject may have a splicing defect in the genes in Table 1 that is a target of hnRNP L. Table 1 includes the SFARI (Simons Foundation Autism Research Initiative) list of autism genes (881 genes). SFARI genes may include genes associated with ASD from an evolving database for the autism research community. More particularly, the subject may have a splicing defect in genes listed in Table 2, which lists a subset of SFARI genes that have a high-scoring hnRNP L motif within 500 bp of one of the Castle splice sites (see, for example, Castle, et al., Nature Genetics 40(12):1416-25, 2008) (338 genes). Table 3 includes a subset of SFARI genes that have a very high scoring putative hnRNP L-binding motif within 500 bp of one of the Castle splice sites (152 genes). Genes listed in Table 4 include a subset of SFARI genes with hnRNP L binding sites near splice events specifically observed in autism (78 genes). Genes listed in Table 5 include a subset of genes bearing hnRNP L binding sites within the SHANK-TSC-mTOR-ERK ASD disease module (27 genes). Genes listed in Table 6 include a subset of genes bearing hnRNP L binding sites that also comprise the SHANK-TSC ASD disease module (18 genes). The subject comprises or has a mutation in an hnRNP L target gene which results in spliceopathy.

[0017] The subject is characterized as having a clinical diagnosis of ASD. For example, the subject may be diagnosed with (a) social communication and social interactions characterized by deficits in social emotional reciprocity; deficits in non-verbal communication; and deficits in developing, maintaining and understanding relationships; and (b) restricted and repetitive behavior characterized by at least 2 of stereotyped movement or speech; insistence on sameness, routines, rituals; restricted, fixated interests; and atypical sensory reactivity. On the other hand, the subject may be from a cohort with neurofibromatosis and tuberous sclerosis who carry a mutation resulting in spliceopathy of the target gene and carry a neurological clinical diagnosis other than of ASD. Exemplary neurological and psychiatric disorders other than ASD include, but are not limited to, intellectual disability, ADHD, dyslexia, epilepsy, bipolar disorder, Alzheimer's disease, Parkinson's disease, depression and schizophrenia.

[0018] The invention also encompasses a method of treating a subject with a neurological disease, which includes the steps of identifying the subject having a splicing defect in an ASD-associated gene, wherein the target gene is characterized as having an hnRNP L binding site, and administering to the subject a spliceopathy rescue agent to repair the splicing defect. Exemplary neurological and psychiatric disorders other than ASD include, but are not limited to, intellectual disability, ADHD, dyslexia, epilepsy, bipolar disorder, Alzheimer's disease, Parkinson's disease, depression and schizophrenia. The spliceopathy rescue agent may be ascochlorin, an ascochlorin derivative, or an ascochlorin analogue, or a non-ascochlorin compound that is neither an ascochlorin derivative nor an ascochlorin analog. Non-limiting examples of a non-ascochlorin compound include a small molecule, peptide, RNA-based compound (e.g., antisense oligonucleotides) and antibody, whether these are natural or synthetic. Other non-ascochlorin compounds also include cefacetrile, cefotaxime, ciproflaxin, netilimicine or a fluoroquinolone/quinolone compound (see, for example, Kang et al., J Proteome Res. 2006 October; 5(10):2620-31). Alternatively, the spliceopathy rescue agent may include a combinational therapy composed of ascochlorin, an ascochlorin derivative, or an ascochlorin analogue and a non-ascochlorin compound.

[0019] An exemplary method of treating a subject with a neurological disease may be carried out by identifying the subject having a splicing defect in an ASD-associated gene, wherein the target gene is characterized as having an hnRNP L binding site. The method includes administering to such a subject ascochlorin, an ascochlorin derivative, or an ascochlorin analogue (e.g., ascofuranone, an ascofuranone derivative or an ascofuranone analog) to repair the splicing defect. In this method, as described above, the ASD-associated target gene does not include AB11, ACSS2, AGAP3, AGXT2L2, APP, ATP2B1, ATP2B4, BIN1, BPTF/FALZ, C12orf41/KANSL2, C14orf133/VIPAR, DMD, DTNA, E1F2C2, EPB41L2, FMNL2, GARNL1/RALGAPA1, ITSN2, KIAA1217, LRRFIP1, MAPT, MAX , MEF2A, NCAM1, PALLD, PDLIM7, PPP2R5C, PTPN3, RPGR, RRN3, SAD1/BRSK2, SAMD4A, SEMA6D, SLC25A3, SLC39A9, SMTN, SORBS1, STXBP5, SVIL, TPM1, TPM3, TRIM66, TTN, VPS29, XPNPEP1, or ZMYND8.

[0020] As described above, the target gene in which the subject has a splicing defect may be characterized as having an hnRNP L binding site within the intron, or within the exon, adjacent to a site of alternative splicing. More specifically, the gene may have an hnRNP L binding site within 5000, 4000, 3000, 2000, 1000, 500, 400, 300, 200, 100 or 50 base pairs of a site of alternative splicing. Further, the gene may have an hnRNP L binding site within 4000, 3000, 2000, 1000, 900, 800, 700, 600, 500, 400, 300, 200, 100 or 50 base pairs of an RBFox1/A2BP1 binding site. In another example, the gene may have an hnRNP L binding site within 4000, 3000, 2000, 1000, 900, 800, 700, 600, 500, 400, 300, 200, 100 or 50 base pairs of the binding site of a splicing factor which is partner of hnRNP L in a splicing complex. For example, aberrant splicing of FOX1 targets (due to a mutation in FOX1, leading in turn to ASD) is also rescued by hnRNP L if the targets are downstream of both splicing factors.

[0021] As described above, exemplary genes in which the subject to be treated has a splicing defect include NF1 gene, TSC1 or TSC2 gene, e.g., a subject with neurofibromatosis having a splicing defect in a NF1 gene or a subject with tuberous sclerosis having a splicing defect in a TSC1 or TSC2 gene. The splicing defect may be in a gene bearing hnRNP L binding sites within the SHANK-TSC-mTOR-ERK ASD disease module, for example, NRXN1, NRXN2, NRXN3, NLGN3, NLGN4X, NLGN4Y, SHANK2, SHANK3, NF1, TSC1, TSC2, MTOR, FMR1, EIF4E, CACNA1C, GRIN1, GRM1, DRD2, MAPK3, GSK3B, GABRB3, SCN1A, MET, HRAS, VLDLR, AKAP9 and CADPS2 or a gene bearing hnRNP L binding sites that also comprise the SHANK-TSC ASD disease module, for example, CADPS2, NRXN1, NRXN2, NRXN3, NLGN3, NLGN4X, NLGN4Y, SHANK2, SHANK3, NF1, TSC1, TSC2, FMR1, EIF4E, CACNA1C, MTOR, GRIN1 and GRM1.

[0022] Alternatively, as described above, the subject has a splicing defect in any ASD-associated gene that is a target of hnRNP L as described herein. For example, the subject may have a splicing defect in any SFARI gene (e.g., Table 1) that is a target of hnRNP L. More particularly, the subject may have a splicing defect in SFARI genes with a high-scoring hnRNP L motif within 500 bp of one of the Castle splice sites (e.g., Table 2), SFARI genes with a very high scoring putative hnRNP L-binding motif within 500 bp of one of the Castle splice sites (e.g., Table 3), SFARI genes with hnRNP L binding sites near splice events specifically observed in autism (e.g., Table 4), a subset of Table 1 genes bearing hnRNP L binding sites within the SHANK-TSC-mTOR-ERK ASD disease module (e.g., Table 5), or genes bearing hnRNP L binding sites that comprise the SHANK-TSC ASD disease module (e.g., Table 6). As described above, the subject has a mutation in the target gene which results in spliceopathy.

[0023] Such subjects are also clinically diagnosed with ASD, for example, with (a) social communication and social interactions characterized by deficits in social emotional reciprocity; deficits in non-verbal communication; and deficits in developing, maintaining and understanding relationships; and (b) restricted and repetitive behavior characterized by at least 2 of stereotyped movement or speech; insistence on sameness, routines, rituals; restricted, fixated interests; and atypical sensory reactivity. On the other hand, the subject may be from a cohort with neurofibromatosis and tuberous sclerosis who carry a mutation resulting in spliceopathy of the target gene and carry a neurological clinical diagnosis other than of ASD, for example, intellectual disability, ADHD, dyslexia, epilepsy, bipolar disorder, Alzheimer's disease, Parkinson's disease, depression and schizophrenia.

[0024] Also within the invention is a method of treating a subject with a neurological disease, which may be carried out by identifying the subject having a splicing defect in an ASD-associated gene, wherein the target gene is characterized as having an hnRNP L binding site, and administering to the subject a non-ascochlorin compound to repair a splicing defect. Examples of a non-ascochlorin compound include, but are not limited to, a non-ascochlorin small molecule, peptide, RNA-based compound (e.g., antisense oligonucleotides) and antibody, whether these compounds are natural or synthetic.

[0025] Similar to the aforementioned therapeutic method using ascochlorin, an ascochlorin derivative, or an ascochlorin analogue, the target gene in which the subject has a splicing defect may be characterized as having an hnRNP L binding site within the intron, or within the exon, adjacent to a site of alternative splicing. More specifically, the gene may have an hnRNP L binding site within 5000, 4000, 3000, 2000, 1000, 500, 400, 300, 200, 100 or 50 base pairs of a site of alternative splicing. Further, the gene may have an hnRNP L binding sites within 4000, 3000, 2000, 1000, 900, 800, 700, 600, 500, 400, 300, 200, 100 or 50 base pairs of an RBFox1/A2BP1 binding site. In another example, the gene may have an hnRNP L binding site within 4000, 3000, 2000, 1000, 900, 800, 700, 600, 500, 400, 300, 200, 100 or 50 base pairs of the binding site of a splicing factor which is partner of hnRNP L in the splicing complex. For example, aberrant splicing of FOX1 targets (due to a mutation in FOX1, leading in turn to ASD) is also rescued by hnRNP L if the targets are downstream of both splicing factors.

[0026] Again, similar to the aforementioned method using ascochlorin, an ascochlorin derivative, or an ascochlorin analogue, exemplary genes in which the subject to be treated has a splicing defect include NF1 gene, TSC1 or TSC2 gene, such as subjects with neurofibromatosis or tuberous sclerosis, respectively. Alternatively, the target gene may be a gene associated with ASD within the SHANK/TSC/mTOR/ERK signaling pathway, for example, CADPS2, NRXN1, NRXN2, NRXN3, NLGN3, NLGN4X, NLGN4Y, SHANK2, SHANK3, NF1, TSC1, TSC2, FMR1, EIF4E, DRD2, MAPK3, GSK3B, GABRB3, CACNA1C, MTOR and SCN1A. Preferably, the splicing defect may be in a gene bearing hnRNP L binding sites that also comprise the SHANK-TSC ASD disease module, for example, CADPS2, NRXN1, NRXN2, NRXN3, NLGN3, NLGN4X, NLGN4Y, SHANK2, SHANK3, NF1, TSC1, TSC2, FMR1, EIF4E, CACNA1C, MTOR, GRIN1 and GRM1.

[0027] Similar to the aforementioned method using ascochlorin, an ascochlorin derivative, or an ascochlorin analogue, the subject has a splicing defect in any ASD-associated gene that is a target of hnRNP L as described herein. For example, the subject may have a splicing defect in any SFARI genes (e.g., Table 1) that is a target of hnRNP L, SFARI genes with a high-scoring hnRNP L motif within 500 bp of one of the Castle splice sites (e.g., Table 2), SFARI genes with a very high scoring putative hnRNP L-binding motif within 500 bp of one of the Castle splice sites (e.g., Table 3), SFARI genes with hnRNP L binding sites near splice events specifically observed in autism (e.g., Table 4), a subset of Table 1 genes bearing hnRNP L binding sites within the SHANK-TSC-mTOR-ERK ASD disease module (e.g., Table 5), or genes bearing hnRNP L binding sites that comprise the SHANK-TSC ASD disease module (e.g., Table 6). The subject has a mutation in the target gene which results in spliceopathy.

[0028] Similar to the aforementioned method using ascochlorin, an ascochlorin derivative, or an ascochlorin analogue, the subject is characterized as having a clinical diagnosis of ASD. For example, the subject may be diagnosed with (a) social communication and social interactions characterized by deficits in social emotional reciprocity; deficits in non-verbal communication; and deficits in developing, maintaining and understanding relationships; and (b) restricted and repetitive behavior characterized by at least 2 of stereotyped movement or speech; insistence on sameness, routines, rituals; restricted, fixated interests; and atypical sensory reactivity. On the other hand, the subject may be from a cohort with neurofibromatosis and tuberous sclerosis who carry a mutation resulting in spliceopathy of the target gene and carry a neurological clinical diagnosis other than of ASD, for example, intellectual disability, ADHD, dyslexia, epilepsy, bipolar disorder, Alzheimer's disease, Parkinson's disease, depression and schizophrenia.

[0029] In addition to the therapeutic methods described above, the invention also provides a diagnostic method of identifying a subject suffering from or at risk of developing ASD or developing intellectual disability. For example, the diagnostic method may be carried out by detecting a defect in an hnRNP L gene or mRNA or protein in a tissue or a cell of the subject. Protein and nucleic acid sequences useful in such therapeutic methods include: mRNA: Homo sapiens heterogeneous nuclear ribonucleoprotein L (HNRNPL), transcript variant 1, mRNA, 2,129 bp linear mRNA Accession: NM_001533.2 GI: 52632382; Homo sapiens heterogeneous nuclear ribonucleoprotein L (HNRNPL), transcript variant 2, mRNA 1,895 bp linear mRNA, Accession: NM_001005335.1 GI: 52632384. Useful protein/polypeptide sequences include: heterogeneous nuclear ribonucleoprotein L isoform a [Homo sapiens], 589 aa protein, Accession: NP_001524.2 GI: 52632383; heterogeneous nuclear ribonucleoprotein L isoform b [Homo sapiens], 456 aa protein, Accession: NP_001005335.1 GI: 52632385. The nature of DNA/RNA mutation includes, but is not limited to: deletion, insertion, point mutation, missense mutation, sense mutation, single nucleotide polymorphism, splice site mutation, cryptic splice site recruitment, copy number variation [(e.g., D'Angelo D et al., Defining the Effect of the 16p11.2 Duplication on Cognition, Behavior, and Medical Comorbidities, JAMA Psychiatry. 2016 January; 73(1):20-30)]

[0030] Intellectual disability (Intellectual developmental disorder) may be diagnosed using the following three-fold diagnostic criteria: (a) deficits in intellectual function, typically as assessed via IQ tests (with a score <70 thought to represent performance more than two standard deviations below the mean); (b) deficits in adaptive functioning in conceptual, social, or practical domains, which are severe enough that ongoing support is needed to function adequately at home, in school, at work, or in the community; and (c) onset of these intellectual and adaptive deficits during the developmental period. For details, see, e.g., the Diagnostic and Statistical Manual of Mental Disorders (DSM-5) (https://dsm.psychiatryonline.org/doi/book/10.1176/appi.books.9780890425596). In addition, there are also suggestions that the cutoff of 70 could be relaxed a little (to, e.g., 75 or 80) if criteria B and C are met. For example, the DSM-5 describes that “For example, a person with an IQ score above 70 may have such severe adaptive behavior problems in social judgment, social understanding, and other areas of adaptive functioning that the person's actual functioning is comparable to that of individuals with a lower IQ score. Thus, clinical judgment is needed in interpreting the results of IQ tests.” For example, if the adaptive functioning deficits are apparent and the IQ is between 70 and 75 or even 80, the criteria for intellectual disability are met.

[0031] In this diagnostic method, the defect in the hnRNP L gene or mRNA or protein in the tissue or the cell of the subject may be assessed by detecting an alteration or a change in an hnRNP L level (e.g., RNA or protein or activity level) versus normal, or an alteration or a change in an hnRNP L mRNA variant or an hnRNP L protein isoform in the tissue or the cell of the subject compared to a normal control hnRNP L level. A decrease or an increase of at least 10% compared to a normal control level may indicate that the subject has or is at risk of developing ASD. Assessment includes using minimally invasive procedures, e.g., using DNA from hair, skin cells, saliva, blood, or iPS cell-derived differentiated cells (e.g., neurons). Assessment of differential hnRNP L expression, examples include but are not limited to mRNA levels, e.g., quantitative RT-PCR analysis using hnRNP L-specific primers (e.g., Origene HNRNPL Human qPCR Primer Pair (NM_001533) cat # HP228107); TwistDx™ isothermal nucleic acid amplification technology that enables combination of primers and detection of multiple hnRNP L variants. For determination of protein levels, assays, e.g., Western blot analysis, using a commercially available anti-human hnRNP L antibody (monoclonal, e.g., clone 4D11, or polyclonal) are useful. hnRNP L variants may be characterized by higher or lower activity compared to a normal control level. Suitable reagents include, but are not limited to, a Tagged/flagged/radiolabeled anti-hnRNP L antibody, a Tagged/flagged/radiolabeled short nucleotide sequence that binds hnRNP L (e.g., CACA repeats, or derived from a known hnRNP L RNA target), Tagged/flagged protein partner (e.g., RBFOX1/A2BP1), or short peptide derived-thereof, and Tagged/flagged nucleotide sequence derived from hnRNP L RNA (based on documented autoregulation). Tagged or flagged reagents are those that are labelled with a radioactive compound visually detectable reagent such as a fluorescent compound (whether the reagent is directly labeled, or by using a secondary conjugated (e.g., Alexa, Cy3, Cy5) antibody directed against the reagent), or that can be detected using a colorimetric assay (e.g., ELISA).

[0032] The method of identifying a subject suffering from or at risk of developing ASD or developing intellectual disability may optionally include the step of determining an efficacy of a therapeutic treatment, which is carried out by showing partial, e.g., at least 10% or complete restoration of a normal hnRNP L RNA, protein or activity level, or an hnRNP L mRNA variant or an hnRNP L protein isoform expression pattern in the tissue or the cell of the subject, where normal is defined as control values found in a corresponding normal human tissue.

[0033] Additional diagnostic methods may be encompassed by the invention. For example, a method of diagnosing a subject with ASD or a risk of developing ASD may include the steps of contacting a tissue or a bodily fluid sample from the subject with an hnRNP L binding agent and a detectable label to form a complex and measuring an amount of the complex.

[0034] Another example of a method encompassed by the invention may include a method of monitoring a disease severity or response to treatment of a subject with ASD, which includes the step of measuring an amount of an hnRNP L RNA, protein or activity level in a tissue or a cell of the subject following administration of a medicament. In this method, a change of an amount of an hnRNP L RNA, protein or activity level over time (e.g., an increase or a decrease) indicates that the disease severity is decreasing in response to treatment.

[0035] The invention also provides a method of screening to identify a spliceopathy rescue agent. For example, the screening method may be carried out by providing a neuronal cell expressing hnRNP L or an ASD-associated gene containing an hnRNP L binding site, contacting the cell with a candidate compound, and detecting an increase in hnRNP L or a reduction in a splicing defect in the ASD-associated gene. In this screening method, detection of the increase in hnRNP L or the reduction in the splicing defect indicates that the compound may have a spliceopathy rescue activity. The screening method to identify a spliceopathy rescue agent may optionally include a step of identifying a compound that induces partial or at least 10% or complete restoration of a normal hnRNP L RNA, protein or activity level, or an hnRNP L mRNA variant or an hnRNP L protein isoform expression pattern, in a tissue of the subject where normal is defined as control values found in corresponding normal human tissue. By the screening method, for example, a non-ascochlorin compound may be identified as a spliceopathy rescue agent. Exemplary cell lines useful in screening assays include the following cells available from American Type Culture Collection (ATCC): CRL-2825, CRL-2768, CRL-10742, HTB-186, CRL-2927, CRL-2542, CRL-2526, CRL-3035, CRL-2532, CRL-2533, CRL-1721.1, CRL-2535, CRL-2534, CRL-2137, CRL-3234, CRL-2142, and CRL-2149. Additional cell lines include HTS and AK I cell lines (e.g., AK Cell lines: Mammalian/human (normal or diseased) iPS cells-derived neuroprogenitor, neuron, or glia including oligodendrocytes, astrocytes (e.g., GIBCO® Human Neural Stem Cells (hNSCs, embryonic H9-derived), rat fetal neural stem cells, rat glial precursor cells (rGPC); rat adrenal gland phaeochromocytoma PC-12 cell line); primary neurons/glia cultures; immortalized neuronal cell lines (e.g., neuroblastoma cell lines: human SH-SY5Y, human SK-N-AS, hybrid rat/mouse F11; mouse hippocampal neuronal HT-22 cell line).

[0036] In addition to the therapeutic, diagnostic or screening methods described above, another aspect of the invention includes compositions useful for the treatment of a subject with a neurological disease. For example, a composition for treating a subject with a neurological disease may contain a spliceopathy rescue agent, wherein the composition repairs a splicing defect in an ASD-associated gene having an hnRNP L binding site. More specifically, an exemplary composition for treating a subject with a neurological disease may contain ascochlorin, an ascochlorin derivative, or an ascochlorin analogue (e.g., ascofuranone, an ascofuranone derivative or an ascofuranone analog). The target ASD-associated gene of the composition for treating a subject with a neurological disease may have an hnRNP L binding site, more particularly, within 5000, 4000, 3000, 2000, 1000, 500, 400, 300, 200, 100 or 50 base pairs of a site of alternative splicing. For these examples of the compositions useful to treat a subject with a neurological disease, the target ASD-associated gene does not include AB11, ACSS2, AGAP3, AGXT2L2, APP, ATP2B1, ATP2B4, BIN1, BPTF/FALZ, C12orf41/KANSL2, C14orf133/VIPAR, DMD, DTNA, E1F2C2, EPB41L2, FMNL2, GARNL1/RALGAPA1, ITSN2, KIAA1217, LRRFIP1, MAPT, MAX , MEF2A, NCAM1, PALLD, PDLIM7, PPP2R5C, PTPN3, RPGR, RRN3, SAD1/BRSK2, SAMD4A, SEMA6D, SLC25A3, SLC39A9, SMTN, SORBS1, STXBPS, SVIL, TPM1, TPM3, TRIM66, TTN, VPS29, XPNPEP1, or ZMYND8.

[0037] Another exemplary composition for treating a subject with a neurological disease may contain a non-ascochlorin compound, wherein the composition repairs a splicing defect in an ASD-associated gene having an hnRNP L binding site. Similar to the composition containing ascochlorin, an ascochlorin derivative, or an ascochlorin analogue, the target ASD-associated gene of the composition may have an hnRNP L binding site within 5000, 4000, 3000, 2000, 1000, 500, 400, 300, 200, 100 or 50 base pairs of a site of alternative splicing.

[0038] Similar to the therapeutic, diagnostic or screening methods described above, exemplary target genes of the compositions for the treatment of a neurological disease include NF1 gene, TSC1 or TSC2 gene in which the subject to be treated has a splicing defect. Such a subject may be from a cohort with neurofibromatosis having a splicing defect in a NF1 gene or a cohort with tuberous sclerosis having a splicing defect in a TSC1 or TSC2 gene. Alternatively, the target gene may be a gene associated with ASD within the SHANK-TSC-mTOR-ERK ASD disease module, for example, NRXN1, NRXN2, NRXN3, NLGN3, NLGN4X, NLGN4Y, SHANK2, SHANKS, NF1, TSC1, TSC2, MTOR, FMR1, EIF4E, CACNA1C, GRIN1, GRM1, DRD2, MAPK3, GSK3B, GABRB3, SCN1A, MET, HRAS, VLDLR, AKAP9 and CADPS2 or a gene bearing hnRNP L binding sites that also comprise the SHANK-TSC ASD disease module, for example, CADPS2, NRXN1, NRXN2, NRXN3, NLGN3, NLGN4X, NLGN4Y, SHANK2, SHANKS, NF1, TSC1, TSC2, FMR1, EIF4E, CACNA1C, MTOR, GRIN1 and GRM1.

[0039] Alternatively, similar to the methods described above, the subject has a splicing defect in any ASD-associated gene that is a target of hnRNP L as described herein. For example, the subject may have a splicing defect in any SFARI genes (e.g., Table 1) that is a target of hnRNP L, SFARI genes with a high-scoring hnRNP L motif within 500 bp of one of the Castle splice sites (e.g., Table 2), SFARI genes with a very high scoring putative hnRNP L-binding motif within 500 bp of one of the Castle splice sites (see, for example, Castle, et al., Nature Genetics 40(12):1416-25, 2008) (e.g., Table 3), SFARI genes with hnRNP L binding sites near splice events specifically observed in autism (e.g., Table 4), a subset of Table 1 genes bearing hnRNP L binding sites within the SHANK-TSC-mTOR-ERK ASD disease module (e.g., Table 5) or genes bearing hnRNP L binding sites that comprise the SHANK-TSC ASD disease module (e.g., Table 6). For other examples, the subject has a mutation in a putative ASD target gene which includes hnRNP L binding sites or a mutation in the target gene which results in spliceopathy.

[0040] Again, similar to the methods described above, the subject is characterized as having a clinical diagnosis of ASD. Or, the subject may carry a hnRNP L mutation resulting in spliceopathy of the target gene and carry a neurological clinical diagnosis other than of ASD, for example, intellectual disability, ADHD, dyslexia, epilepsy, bipolar disorder, Alzheimer's disease, Parkinson's disease, depression and schizophrenia.

[0041] A further aspect of the invention also includes a pharmaceutical composition for treating a subject with intellectual impairment or a neurological disease as described above. For example, the pharmaceutical composition contains the compositions useful for the treatment of a subject with a neurological disease comprising a spliceopathy rescue agent, or ascochlorin, an ascochlorin derivative, or an ascochlorin analogue, or a non-ascochlorin compound to repair a splicing defect in a target gene as described above, and a pharmaceutically acceptable carrier.

[0042] A further aspect of the invention also includes a method of identifying a subject suffering from or at risk of developing ASD or developing intellectual disability comprising detecting a defect in an ASD-associated gene or in the mRNA or protein of the gene in a tissue or a cell of the subject, the ASD-associated gene being characterized as having an hnRNP L binding site. In some embodiments, detecting the defect in the gene or mRNA or protein in the tissue or cell of the subject comprises detecting an alteration or a change in a RNA level or a protein level or an activity level of the ASD-associated gene versus normal levels or an alteration or a change in an mRNA variant or a protein isoform of the ASD-associated gene in the tissue or cell of the subject compared to a normal control level, wherein a decrease or an increase of at least a certain percentage (e.g., 10%, 20%, 25%, 30%, 40%, 50%, 60%, 70%, 80%, 90%, 95%, 99%, 100%, 2-fold, 5-fold, 10-fold, or more) compared to a normal control level indicates that the subject comprises or is at risk of developing ASD or intellectual disability. In some embodiments, the method described herein further comprises determining an efficacy of a therapeutic treatment, wherein the therapeutic treatment is indicated as effective if resulting in partial or at least a certain percentage (e.g., 10%, 20%, 25%, 30%, 40%, 50%, 60%, 70%, 80%, 90%, 95%, 99%, or more), or complete, restoration of a normal RNA level, a normal protein level or a normal activity level of the ASD-associated gene or an mRNA variant or a protein isoform expression pattern of the ASD-associated gene, in the tissue of the subject where normal is defined as control values found in a corresponding normal human tissue.

[0043] A further aspect of the invention also includes a method of identifying an ASD-associated gene, characterized as having an hnRNP L binding site, comprising:

[0044] i) providing a library of hnRNP L binding sequences;

[0045] ii) obtaining a position specific scoring matrix (PSSM) from the library in step i) to produce an 8-mer consensus hnRNP L binding motif; and

[0046] iii) screening a library of target genes by sequence alignment to identify at least one ASD-associated gene comprising the consensus hnRNP L binding motif in step ii).

[0047] In some embodiments, the 8-mer consensus hnRNP L binding motif comprises a sequence of ACACACAC (SEQ ID NO: 968) or ACATACAC (SEQ ID NO: 969), or any one of related sequences disclosed herein, such as ATACACAC (SEQ ID NO: 970), ATATACAC (SEQ ID NO: 971), ACGCACAC (SEQ ID NO: 972), ACGTACAC (SEQ ID NO: 973), ATGCACAC (SEQ ID NO: 974), ATGTACAC (SEQ ID NO: 975), or X₁X₂X₃X₄X₅CAX₆ (SEQ ID NO: 976), wherein X₁ is A, C, or T, X₂ is C or T, X₃ is A or G, X₄ is C or T, X₅ is A, G, or T, and X₆ is C or T.

[0048] In some embodiments, the at least one ASD-associated gene described herein has an hnRNP L binding site

[0049] i) within the intron, or within the exon, adjacent to a site of alternative splicing;

[0050] ii) within 500 base pairs of a site of alternative splicing;

[0051] iii) within 200 base pairs of an RBFox1/A2BP1 binding site; and/or

[0052] i) within 200 base pairs of the hnRNP L binding site of a splicing factor which is partner of hnRNP L in the splicing complex.

[0053] In some embodiments, the at least one ASD-associated gene described herein has a high (>=6) or very high (>=10) score according to the PSSM representing hnRNP L binding motifs.

[0054] A further aspect of the invention also includes a method of diagnosing a subject having an autism spectrum disorder (ASD) or intellectual disability or having a risk of developing an ASD or intellectual disability, comprising:

[0055] i) providing a tissue or a bodily fluid sample from the subject;

[0056] ii) measuring the expression levels and/or activity of hnRNP L or an ASD-associated gene in the tissue or bodily fluid sample; and

[0057] iii) comparing the measured expression levels and/or activity in step ii) to a pre-determined expression levels and/or activity in a normal subject without an ASD or intellectual disability,

[0058] wherein a decreased expression levels and/or activity of hnRNP L or the ASD-associated gene in the subject, relative to the pre-determined expression levels and/or activity in the normal subject without an ASD or intellectual disability, indicates that such subject has an ASD or intellectual disability or has a risk of developing an ASD or intellectual disability.

[0059] A further aspect of the invention also includes a method of treating a subject having a neurological disease, such as ASD or intellectual disability, comprising:

[0060] i) providing a tissue or a bodily fluid sample from the subject;

[0061] ii) measuring the expression levels and/or activity of hnRNP L or an ASD-associated gene in the tissue or bodily fluid sample;

[0062] iii) comparing the measured expression levels and/or activity in step ii) to a pre-determined expression levels and/or activity in a normal subject without the neurological disease; and

[0063] iv) if the measured expression levels and/or activity in step ii) is less than the pre-determined expression levels and/or activity in the normal subject in step iii), providing the subject a pharmaceutically effective amount of an agent to reduce the severity of the neurological disease.

[0064] A further aspect of the invention also includes a method of identifying an agent for treating a subject having a neurological disease, such as ASD and intellectual disability, comprising:

[0065] i) providing a tissue or a bodily fluid sample from the subject;

[0066] ii) measuring the expression levels and/or activity of hnRNP L or an ASD-associated gene in the tissue or bodily fluid sample;

[0067] iii) comparing the measured expression levels and/or activity in step ii) to a pre-determined expression levels and/or activity in a normal subject without the neurological disease; and

[0068] iv) if the measured expression levels and/or activity in step ii) is less than the pre-determined expression levels and/or activity in the normal subject in step iii), identifying an agent capable of increasing the expression levels and/or activity in step ii) in a cell-based assay.

[0069] A further aspect of the invention also includes a method of monitoring severity of a neurological disease, such as ASD and intellectual disability, in a subject, comprising

[0070] i) providing a tissue or a bodily fluid sample from the subject;

[0071] ii) measuring the expression levels and/or activity of hnRNP L or an ASD-associated gene in the tissue or bodily fluid sample;

[0072] iii) repeating the measurement in step ii) over time; and

[0073] iv) comparing the measured expression levels and/or activity in step iii) with the measured expression levels and/or activity in step ii);

[0074] wherein a reduction of the measured expression levels and/or activity in step iii) relative to the measured expression levels and/or activity in step ii) indicates an increased neurological disease severity.

[0075] A further aspect of the invention also includes a method of monitoring response to treatment of an agent in a subject having a neurological disease, such as ASD or intellectual disability, comprising

[0076] i) providing a tissue or a bodily fluid sample from the subject;

[0077] ii) measuring the expression levels and/or activity of hnRNP L or an ASD-associated gene in the tissue or bodily fluid sample;

[0078] iii) comparing the measured expression levels and/or activity in step ii) to a pre-determined expression levels and/or activity in a normal subject without the neurological disease;

[0079] iv) if the measured expression levels and/or activity in step ii) is less than the pre-determined expression levels and/or activity in the normal subject in step iii), providing the subject a pharmaceutically effective amount of an agent to reduce the severity of the neurological disease;

[0080] v) repeating providing in step i) and measurement in step ii) over time; and

[0081] vi) comparing the measured expression levels and/or activity in step v) with the measured expression levels and/or activity in step ii);

[0082] wherein an increase of the measured expression levels and/or activity in step v) relative to the measured expression levels and/or activity in step ii) indicates a positive response to treatment.

[0083] In some embodiments, the ASD-associated gene described herein comprises at least one of NF1, TSC1, and TSC2.

[0084] In some embodiments, the ASD-associated gene has an hnRNP L binding site, preferably an hnRNP L binding site

[0085] i) within the intron, or within the exon, adjacent to a site of alternative splicing;

[0086] ii) within 500 base pairs of a site of alternative splicing;

[0087] iii) within 200 base pairs of an RBFox1/A2BP1 binding site; and/or

[0088] iv) within 200 base pairs of the binding site of a splicing factor which is partner of hnRNP L in the splicing complex,

[0089] optionally wherein the hnRNP L binding site comprises a sequence of ACACACAC (SEQ ID NO: 968) or ACATACAC (SEQ ID NO: 969), or any one of related sequences disclosed herein, such as ATACACAC (SEQ ID NO: 970), ATATACAC (SEQ ID NO: 971), ACGCACAC (SEQ ID NO: 972), ACGTACAC (SEQ ID NO: 973), ATGCACAC (SEQ ID NO: 974), ATGTACAC (SEQ ID NO: 975), or X₁X₂X₃X₄X₅CAX₆ (SEQ ID NO: 976), wherein X₁ is A, C, or T, X₂ is C or T, X₃ is A or G, X₄ is C or T, X₅ is A, G, or T, and X₆ is C or T.

[0090] In some embodiments, the ASD-associated gene does not comprise AB11, ACSS2, AGAP3, AGXT2L2, APP, ATP2B1, ATP2B4, BIN1, BPTF/FALZ, C12orf41/KANSL2, C14orf133/VIPAR, DMD, DTNA, E1F2C2, EPB41L2, FMNL2, GARNL1/RALGAPA1, ITSN2, KIAA1217, LRRFIP1, MAPT, MAX , MEF2A, NCAM1, PALLD, PDLIM7, PPP2R5C, PTPN3, RPGR, RRN3, SAD1/BRSK2, SAMD4A, SEMA6D, SLC25A3, SLC39A9, SMTN, SORBS1, STXBPS, SVIL, TPM1, TPM3, TRIM66, TTN, VPS29, XPNPEP1, or ZMYND8.

[0091] In some embodiments, the subject comprises a splicing defect of the ASD-associated gene. For example, the splicing defect is caused by at least one mutation in the hnRNP L or the ASD-associated gene.

[0092] In some embodiments, the ASD-associated gene described herein comprises at least one gene listed in Tables 1-4, preferably Table 3 or Table 4.

[0093] In some embodiments, the ASD-associated gene described herein comprises at least one gene associated with ASD within the SHANK/TSC/mTOR/ERK signaling pathway. For example, the ASD-associated gene comprises at least one gene listed in Table 5 or Table 6.

[0094] Each embodiment disclosed herein is contemplated as being applicable to each of the other disclosed embodiments.

[0095] Other features and advantages of the invention will be apparent from the following description of the preferred embodiments thereof, and from the claims. Unless otherwise defined, all technical and scientific terms used herein have the same meaning as commonly understood by one of ordinary skill in the art to which this invention belongs. Although methods and materials similar or equivalent to those described herein can be used in the practice or testing of the present invention, suitable methods and materials are described below.

[0096] All references, e.g., journal articles, protein or nucleic acid sequence accession numbers, cited U.S. patents, U.S. patent application publications and PCT patent applications designating the U.S., are hereby incorporated by reference in their entirety.

### DESCRIPTION OF THE DRAWINGS

[0097] FIG. 1 is a diagram showing a computational analysis that identified hnRNP L candidate targets in autism genes.

[0098] FIG. 2 is a table showing patient cohorts.

[0099] FIG. 3 is a table showing design of studies to identify patient-specific therapeutics.

[0100] FIG. 4 is a schematic and table showing that selection of ascochlorin derivatives/analogs includes low toxicity compounds.

[0101] FIG. 5 is a diagram showing the results of bioinformatics screening and identification of high scoring hnRNP L motifs and rbfox 1 site near exons 26, 27, and 32 of TSC2.

[0102] FIG. 6 is a table showing absence of significant toxicity with administration of ascochlorin or derivatives thereof in multiple disease models.

[0103] FIG. 7 is a diagram showing the signaling pathways and possible treatments associated with ASD.

[0104] FIG. 8 is a diagram showing that major components of the SHANK/TSC-centered ASD disease module are candidate targets of hnRNP L.

[0105] FIG. 9 is a diagram showing that candidate targets of hnRNP L (circles) are key members of post-synaptic pathways associated with autism spectrum disorder (ASD).

[0106] FIG. 10 is a table of ascochlorin and derivatives thereof and corresponding chemical structures.

[0107] FIG. 11 is a table showing that the ascochlorin derivatives 4-O-methyl-ascochlorin (MAC), and 4-O-ethyl-ascochlorin display low toxicity as assessed by high LD50 after i.p. or oral administration.

[0108] FIG. 12 is a diagram showing compounds 18 and 19 from West et al. Eur. J. Med. Chem. 2017.

[0109] FIG. 13 is a diagram showing ascochlorin derivatives/analogs and corresponding chemical structures.

[0110] FIG. 14A and FIG. 14B are diagrams showing a model of pathogenic mutation (αP3A23′ G>A)-induced aberrant exon P3A inclusion that is antagonistically regulated by hnRNP L and an hnRNP L-like paralogue hnRNP LL (see Rahman et al. (2013) Sci Rep. 3:2931). Early spliceosome complex formation on CHRNA I pre-mRNA with alternative exon P3A are schematically shown. Large letters indicate functional binding of splicing factors, whereas small letters represent compromised binding of splicing factors. The sequence of point mutation in exon P3A (αP3A23′ G>A) is underlined. FIG. 14A shows that in the wild-type context, hnRNP L (L) binds to wild-type exon P3A and interacts with PTB through the proline-rich region (RRR), which stabilizes PTB binding to the upstream PPT (YYYY). The hnRNP L-PTB interaction prevents association of U2AF⁶⁵ (65) to PPT and U1 snRNP (U1) to the 5′ splice site. The formation of exon-defined E (EDE) complex is thus impaired, which leads to skipping of exon P3A. FIG. 14B shows that the αP3A23′ G>A mutation switches binding to hnRNP L to hnRNP LL (LL). Lack of PRR in hnRNP LL fails to stabilize PTB binding to the upstream PPT, which allows binding of U1 snRNP (U1) and U2AF⁶⁵ (65) on pre-mRNA. The formation of the exon-defined E (EDE) complex facilitates abnormal inclusion of exon P3A.

[0111] FIG. 15A and FIG. 15B are diagrams illustrating how one mutation in an hnRNP L binding site can affect hnRNP L binding, leading in turn to aberrant processing of the target. FIG. 15A shows that the hnRNP L binding site (localized either in the exon, or in the intron, of the hnRNP L target gene/transcript) is normal (i.e., displays wild-type sequence). HnRNP L shows normal affinity for the binding site, leading to normal splicing of the corresponding target. FIG. 15B shows that the hnRNP L binding site bears a mutation (e.g., single nucleotide variant, deletion, insertion). HnRNP L shows decreased affinity for the site, leading to abnormal splicing of the corresponding target. Aberrant splicing of the target may in turn result in neurological diseases, such as ASD and intellectual disability.

[0112] FIG. 16 is a diagram showing the amino acid sequence of NRXN1.

[0113] FIG. 17 is a diagram showing the amino acid sequence of NRXN2.

[0114] FIG. 18 is a diagram showing the amino acid sequence of NRXN3.

[0115] FIG. 19 is a diagram showing the amino acid sequence of NLGN3.

[0116] FIG. 20 is a diagram showing the amino acid sequence of NLGN4X.

[0117] FIG. 21 is a diagram showing the amino acid sequence of NLGN4Y.

[0118] FIG. 22 is a diagram showing the amino acid sequence of SHANK2.

[0119] FIG. 23 is a diagram showing the amino acid sequence of SHANK3.

[0120] FIG. 24 is a diagram showing the amino acid sequence of NF1.

[0121] FIG. 25 is a diagram showing the amino acid sequence of TSC1.

[0122] FIG. 26 is a diagram showing the amino acid sequence of TSC2.

[0123] FIG. 27 is a diagram showing the amino acid sequence of MTOR.

[0124] FIG. 28 is a diagram showing the amino acid sequence of FMR1.

[0125] FIG. 29 is a diagram showing the amino acid sequence of EIF4E.

[0126] FIG. 30 is a diagram showing the amino acid sequence of CACNA1C.

[0127] FIG. 31 is a diagram showing the amino acid sequence of GRIN1.

[0128] FIG. 32 is a diagram showing the amino acid sequence of GRM1.

[0129] FIG. 33 is a diagram showing the amino acid sequence of CADPS2.

### DETAILED DESCRIPTION

[0130] A small molecule ascochlorin (and/or derivatives and analogs) is useful as a pharmacological modifier of abnormal splicing. The studies described herein identify genes that may be characterized by a splicing defect that can be rescued by ascochlorin and related compounds. Identification of subjects with such defects (in contrast to other mutations, e.g., deletions or other mutations) is useful to segregate patients suitable for treatment.

[0131] FIG. 1 shows the strategy used to identify hnRNP L candidate targets in autism genes using a binding site model. A bioinformatic approach was established to identify within the publicly available SFARI list of autism genes (Table 1), the targets of hnRNP L. 881 genes involved in autism were examined for hnRNP L binding site(s). Candidate targets downstream of the splicing factor hnRNP L have been identified in the SFARI list of autism genes (Table 1); corresponding target genes have been grouped into genes with high-scoring, likely hnRNP L binding sites (Table 2; 338 genes) and genes with very high-scoring, likely hnRNP L binding sites (Table 3; 152 genes). Among the genes bearing very high scoring hnRNP L binding sites (Table 3), five were found within the SHANK/TSC-centered ASD-disease module of 14 closely interacting partners (module described in Peca and Feng, Curr Opin Neurobiol. 2012 October; 22(5):866-72) (FIG. 8). Among the genes bearing high scoring hnRNP L binding sites (Table 2), multiple (18) are found within the SHANK/TSC/mTOR/ERK signaling pathway associated with ASD (pathways described in Goldani et al., Front Psychiatry. 2014 Aug. 12; 5:100). Targets with nearby (with 500 bases of a hnRNP L binding site) RBFox1/A2BP1 binding sites were also identified.

[0132] Of patients with Tuberous Sclerosis (TSC1 or TSC2) or Neurofibromatosis (NF1), approximately ½ also comprise ASD. 30-40% of such patients are characterized with splicing defects.

### Isoprenoid Antibiotics

[0133] Isoprenoid antibiotics, including but not limited to the compounds ascochlorin, and its derivatives/analogues (i.e. natural and synthetic related compounds, e.g. ascofuranone, ascofuranol, MAC, AS-6, cylindrol A5, vertihemipterin A, vertihemipterin A aglycone, 8′-hydroxyascochlorin, 8′,9′-dehydroaschchlorin, 8′-acetoxyascochlorin, colletochlorin) can be used directly, and/or as chemical template structures, to treat autism, autism spectrum disorder and related neurological and psychiatric disorders, including but not limited to, mental retardation, learning disability, attention deficit hyperactivity disorder, dyslexia, epilepsy, bipolar disorder, and schizophrenia.

[0134] Ascochlorin been shown to increase hnRNP L protein levels in vitro (Kang et al., J Proteome Res. 2006 October; 5(10):2620-3). As described herein, the hnRNP L pathway was utilized to identify novel genes/targets relevant to the treatment of autism spectrum disorder. A cell-based assay to identify drugs that modulate hnRNP L levels is outlined. This cell-based assay, optimized in cell types where hnRNP L plays a role in cell physiology/morphology (including but not limited to, neurons, glia, stem cells, pluripotent/multipotent progenitor cells, or undifferentiated cells), enables the identification of pharmacological compounds that are useful for the development of autism spectrum disorder therapeutics. In addition to ASD, this screening strategy is useful to identify novel targets/pre-therapeutic leads for other neurological and psychiatric disorders, including but not limited to, mental retardation, intellectual disability, learning disability, attention deficit hyperactivity disorder, dyslexia, epilepsy, bipolar disorder, and schizophrenia.

### Autism Spectrum Disorder

[0135] Autism spectrum disorder (ASD) is a complex neurodevelopmental disorder that is typically recognized in early childhood and has a lifelong course (Lacivita et al., J. Med. Chem. 2017, 60 (22), 9114-9141 and references cited therein). According to an art-recognized diagnostic criteria, it is characterized by two core symptoms: (1) persistent deficits in social communication and social interaction, (2) restricted, repetitive patterns of behavior, interests, and activities. The diagnosis is based on clinical observation and further established by standardized testing of the patient with the Autism Diagnostic Observation Schedule 2, and/or by parental interview with the Autism Diagnostic Interview-Revised. Thus far, no behavioral, neuroimaging, electrophysiological, or genetic tests can specifically diagnose ASD. Comorbid conditions such as intellectual disability, seizures, and sleep problems are frequent, whereas anxiety, depression, and obsessive-compulsive disorder (OCD) are less frequent.

[0136] ASD is distinguished from most other behavioral disorders. The designation of ASD refers to a set of neurodevelopmental disorders comprising an early onset in life and gender prevalence. For example, the prevalence of autism spectrum disorder (ASD) in the United States is 1 in 68 children (1 in 42 boys and 1 in 189 girls) ASD has recently emerged as a major public health issue worldwide.

[0137] Altered neurodevelopment during the first and second trimesters of prenatal life is believed to be an underlying neuropathological cause of ASD. Post-mortem studies have unveiled neuroanatomic and cytoarchitectonic aberrations in various brain regions, including cerebellum, hippocampus, inferior olivary complex, amygdala, entorhinal cortex, fusiform gyrus, and anterior and posterior cingulate cortex, with increased growth of the frontal lobes, thinner cortical minicolumns, and increased dendritic spine density.

[0138] These aberrations are related to alterations occurring during early pregnancy, such as reduced programmed cell death and/or increased cell proliferation, altered cell migration, abnormal cell differentiation with reduced neuronal body size, abnormal neurite sprouting, and pruning that cause atypical wiring into the brain. In addition, because neurodevelopmental processes are still active into late prenatal and postnatal life, aberrations involve reduced synapse formation and delayed myelination. The observed abnormal neuronal wiring was previously thought to be characterized by long-range hypoconnectivity and local hyperconnectivity. Studies have instead shown that abnormal neuronal wiring is characterized by an individualized combination of hyper- and hypoconnectivity specific to each ASD patient. The plasticity of the brain post-natally and well into adolescence provides an opportunity for therapeutic intervention.

[0139] The neurocognitive phenotype of ASD is the result of a complex and an heterogeneous set of genetic and environmental causes. In some patients, the disorder is the result of genetic causes due to known chromosomal aberrations or mutations, while in other patients, the disorder is more likely related to environmental causes, such as prenatal exposure to chemical pollutants, toxins, viruses, or drugs.

[0140] Neurological disorders characterized by an hnRNP L binding site aberration-mediated spliceopathy are treated using isoprenoid (prenyl-phenol) antibiotics, including but not limited to the compounds ascochlorin, its derivatives and analogs (e.g. ascofuranone, ascofuranol, MAC, AS-6, cylindrol As, vertihemipterin A, vertihemipterin A aglycone, 8′-hydroxyascochlorin, 8′,9′-dehydroaschchlorin, 8′-acetoxyascochlorin, colletochlorin) which can be used directly, and/or as chemical template structures, to help treat neurological disorders in humans. The relevant neurological and psychiatric disorders include, but are not limited to, autism, autism spectrum disorder, mental retardation, learning disability, intellectual disability, attention deficit hyperactivity disorder, dyslexia, epilepsy, bipolar disorder, and schizophrenia.

### Natural Sources of the Isoprenoid Antibiotic Compounds

[0141] Isoprenoid antibiotics were originally isolated from the phytopathogenic fungus Ascochyta viciae. (Sasaki, H. et al. J Antibiot (Tokyo), 1973, 26:676-680). Among them, ascochlorin and ascofuranone have been shown to be non-toxic compounds. Structurally related compounds have been subsequently isolated from other fungi (e.g., Fusarium, Cylindrocladium, Cylindrocladium ilicicola, Nectria coccinea, Colletotrichum nicotianae, Acremonium luzulae, Cephalosporium diospyri, Verticillium, Cylindrocarpon lucidum, Nigrosabulum globosum, and the insect pathogenic fungus Verticillium hemipterigenum). (Hosono, K. et al. J Antibiot (Tokyo), 2009, 62:571-574; Seephonkai, P. et al. J Antibiot (Tokyo), 2004, 57:10-16).

### Physiological Properties of the Isoprenoid Antibiotic Compounds

[0142] Studies have demonstrated that the methylated derivative of ascochlorin, 4-O-methylascochlorin (MAC), increases the expression of vascular endothelial growth factor (VEGF) and glucose transporter 1 (GLUT-1) (Jeong J. H. et al. Biochem Biophys Res Commun. 2011;406:353-358). Both VEGF and GLUT-1 RNAs are well-established targets of hnRNP L (Hamilton B. J. et al. Biochem Biophys Res Commun. 1999;261:646-651; Ray P. S. et al. Nature. 2009;457:915-919; Shih S. C. et al. J Biol Chem. 1999;274:1359-1365).

[0143] Ascochlorin and/or its derivatives promote the maintenance of normal brain physiology by targeting hnRNP L and/or components of the coordinated hnRNP L-regulated pathway(s). The compounds and methods of the invention provide pharmacological leads to help treat autism spectrum disorder and additional neurological and psychiatric disorders. Ascochlorin and derivatives (e.g., MAC) as well as analogs (e.g., ascofuranone) display antitumorigenic properties, both in vitro and in vivo (summarized in Table 1 in Min-Wen et al., Adv Protein Chem Struct Biol. 2017;108:199-225).

[0144] In addition to anticancer properties, ascochlorin and its derivatives exhibit additional physiological activities, including antimicrobial/antiviral activity, trypanocidal properties, hypolipidemic activity, suppression of hypertension, improvement of type I and II diabetes, anti inflammatory, and immunomodulation. (Yabu, Y. et al. Parasitol Int. 2003, 52:155-164; Hosono, K. et al. J Antibiot (Tokyo), 2009, 62:571-574; Lee et al., J Cell Biochem. 2016 April; 117(4):978-87; Shen et al., Eur J Pharmacol. 2016 Nov. 15; 791:205-212). Examples of ascochlorin/derivative treatment effects in various rodent models of disease are also shown in FIG. 6.

[0145] Other examples of ascochlorin derivatives may be found in:
[0146] (i) Pubchem databases: http://www.ncbi.nlm.nih.gov/pccompound/?term=ascochlorin; by using the “similar compounds” interactive link;
[0147] (ii) Pharmaceutical composition and method of using the same. U.S. Pat. No. 3,995,061.
[0148] (iii) Ascochlorin derivatives, and pharmaceutical composition containing the same. U.S. Pat. No. 4,500,544;
[0149] (iv) Pyridyl carbonyl ascochlorin derivatives and pharmaceutical compositions containing the same. U.S. Pat. No. 4,542,143;
[0150] (v) Ligands of nuclear receptor. U.S. Pat. No. 6,605,639.
[0151] (vi) Ascochlorin derivative and use thereof as ampk activator. WO 2017/119515.
[0152] (vii). R. A. West, et al., African trypanosomiasis: Synthesis & SAR enabling novel drug discovery of ubiquinol mimics for trypanosome alternative oxidase, European Journal of Medicinal Chemistry 141 (2017) 676-689, https://doi.org/10.1016/j.ejmech.2017.09.067.
[0153] (viii). Togashi, M et al., Ascochlorin Derivatives as Ligands for Nuclear Hormone Receptors. J. Med. Chem. 2003; 46:4113-4123.
[0154] (ix). Saimoto, H et al., Pharmacophore Identification of Ascofuranone, Potent Inhibitor of Cyanide-Insensitive Alternative Oxidase of Trypanosoma brucei. J. Biochem. 2013; 153:267-273.

[0155] Additional examples of ascochlorin derivatives include an ascochlorin derivative from Cylindrocarpon sp. FKI-4602. Kawaguchi et al., J Antibiot (Tokyo). 2013 January; 66(1):23-9; ascochlorin derivatives from the leafhopper pathogenic fungus Microcera sp. BCC 17074. Isaka et al., J Antibiot (Tokyo). 2015 January; 68(1):47-5; and competitive Hdhodh inhibitorsm Shen et al., Eur J Pharmacol. 2016 Nov. 15; 791:205-212. The contents of each of the foregoing references is hereby incorporated by reference.

[0156] Splicing Factor hnRNP L and Downstream RNA Targets:

[0157] Proteome analysis has demonstrated that ascochlorin treatment of human osteosarcoma cells (U2OS) results in a ≥10 fold increase in the levels of three proteins, including the splicing factor hnRNP L (first most upregulated protein, 12x), as well as BIN1 (third most upregulated protein, 10x) (Kang J. H. et al. J Proteome Res. 2006;5:2620-2631). It has been determined by bioinformatics analysis that BIN1 is a candidate target of hnRNP L (Table 2). Importantly, candidate targets comprise a cluster of genes/proteins (i.e., NLGN, NRXN, SHANK, TSC2, FMR1, that are close interacting partners in the SHANK-centered ASD-disease module, as described in Peca and Feng, Curr Opin Neurobiol. 2012 October; 22(5):866-72). Missplicing in these targets has been linked to ASD (Smith R M, Sadee W. Front Synaptic Neurosci. 2011 Jan. 26; 3:1; Talebizadeh et al., J Med Genet 2006;43:e21; Tyburczy et al., PLoS Genet. 2015 Nov. 5; 11(11); Leblond et al., PLoS Genet. 2012 Feburay; 8(2):e1002521; Shinahara et al., J Med Invest. 2004 February; 51(1-2):52-8). In addition, the BIN1 gene was shown to be associated with autism spectrum disorder (Connolly J. J. et al. Child Dev. 2013 January-February; 84(1):17-33). Previous studies have also shown that a mutation in BIN1 is associated with delayed motor and speech development and mild mental retardation (Claeys K. G., et al. Neurology 2010; 74:519-521) as well as other pathologies (Claeys K. G., et al. Neurology 2010; 74:519-521; Fugier C., et al. Nat. Med. 2011; 17:720-725; Toussaint A. et al. Acta Neuropathol. 2011; 121:253-266).

[0158] Mutations in the binding sites for splicing factors have been identified that lead to disease in human subjects (whether the binding site is intronic or exonic on the nucleic acid target). For example, the prevalent c. 639+919 G>A mutation in the lysosomal alpha-galactosidase A gene causes Fabry disease in humans by abolishing the binding of the splicing factors hnRNPA1 and hnRNP A2/B1 to a splicing silencer (Palhais B, Dembic M, Sabaratnam R, Nielsen K S, Doktor T K, Bruun G H, Andresen B S. The prevalent deep intronic c. 639+919 G>A GLA mutation causes pseudoexon activation and Fabry disease by abolishing the binding of hnRNPA1 and hnRNP A2/B1 to a splicing silencer, Mol Genet Metab. 2016 November; 119(3):258-269. doi: 10.1016/j.ymgme.2016.08.007. Epub 2016 Aug. 27).

[0159] Mutations in the binding site for hnRNP L have also been identified that underlie human disease. A single nucleotide mutation (i.e., αP3A23′ G>A) in exon P3A in the CHRNA1 gene, that encodes the muscle nicotinic acetylcholine receptor alpha subunit (Entrez Gene: 1134 Ensembl: ENSG00000138435), causes severe congenital myasthenic syndrome. The mutation diminishes the affinity of hnRNP L for the corresponding binding sequence on the CHRNA1 transcript. The mechanistic details of the molecular defect are shown in FIGS. 14A and 14B, adapted from Rahman et al. (2013) HnRNP L and hnRNP LL antagonistically modulate PTB-mediated splicing suppression of CHRNA1 pre-mRNA, Sci Rep. 3:2931. doi: 10.1038/srep02931.

[0160] A graphic illustration showing how one mutation in an hnRNP L binding site can affect hnRNP L binding, leading in turn to aberrant processing of the target, is provided in FIGS. 15A and 15B.

HnRNP L as a Modifier of Autism and Candidate RNA targets of hnRNP L

[0161] Bioinformatics studies were carried out on human genes linked to ASD.

[0162] Table 1 contains a list of 881 human genes linked to autism spectrum disorders. Table 2 contains 338 genes from Table 1 whose genomic sequences (in human genome version GRCh38) include high-scoring, likely hnRNP L binding sites within 500 bp of a documented site of alternative splicing.

[0163] SELEX sequences of hnRNP L binding sites from Hui, et al. EMBO J. 2005 Jun. 1; 24(11):1988-98 were used as input to the program MEME (Bailey and Elkan, Proc Int Conf Intell Syst Mol Biol. 1994;2:28-36) to create a position specific state matrix (PSSM) characterizing putative binding sites.

### Log-Likelihood Scores and Position Specific State Matrix (PSSM)

[0164] As used herein, the log-likelihood is the base 2 logarithm of the likelihood. Due to its convenience, the log-likelihood was used in place of the likelihood in maximum likelihood estimation of the parameter given a specific dataset and related techniques. The likelihood provides an indication of how much the data contribute to the probability of the parameter value. More rigorously, the likelihood of a parameter value, given specific data, may be the probability of the data given the parameter value.

[0165] A position specific scoring matrix (PSSM) is a matrix comprised of log-likelihood scores that compare the probability of seeing the character b in position u of a motif to the probability of seeing b in position u under a random background model. The program MEME (Bailey and Elkan, Proc Int Conf Intell Syst Mol Biol. 1994; 2:28-36) is one method commonly used to infer PSSMs representing common binding motifs from a set of sequences thought to share them. MEME was run on the hnRNPL binding sequences taken from Hui, et al. EMBO J. 2005 Jun. 1; 24(11):1988-98, and obtained the following PSSM, where the rows represent the nucleotides adenine, cytosine, guanine, and thymine, and the columns represent the eight consecutive nucleotides in a putative hnRNP L binding motif.

| | 1 | 2 | 3 | 4 | 5 | 6 | 7 | 8 |
|---|---|---|---|---|---|---|---|---|
| A | 1.644 | −4.000 | 1.700 | −3.000 | 1.672 | −4.000 | 1.907 | −4.000 |
| C | −1.415 | 1.615 | −4.000 | 1.129 | −4.000 | 1.907 | −4.000 | 1.700 |
| G | −2.415 | −4.000 | −0.678 | −4.000 | −1.000 | −3.000 | −3.000 | −4.000 |
| T | −1.678 | −0.300 | −4.000 | 0.700 | −2.000 | −4.000 | −4.000 | −0.678 |

[0166] To determine the log-likelihood score of a new 8-mer sequence s under the model, all one needs to do is add up the corresponding scores of the nucleotides in s in the corresponding position. For example, for the sequence CCAAACAC (SEQ ID NO: 977), the relevant entries are bolded:

| | 1 | 2 | 3 | 4 | 5 | 6 | 7 | 8 |
|---|---|---|---|---|---|---|---|---|
| A | 1.644 | −4.000 | 1.700 | −3.000 | 1.672 | −4.000 | 1.907 | −4.000 |
| C | −1.415 | 1.615 | −4.000 | 1.129 | −4.000 | 1.907 | −4.000 | 1.700 |
| G | −2.415 | −4.000 | −0.678 | −4.000 | −1.000 | −3.000 | −3.000 | −4.000 |
| T | −1.678 | −0.300 | −4.000 | 0.700 | −2.000 | −4.000 | −4.000 | −0.678 |

[0167] Summing the values in the bolded squares of the matrix gives a total log-likelihood score of 6.086, meaning that the probability of seeing the observed 8-mer CCAAACAC (SEQ ID NO: 977) is at least 67.9 (or 2^{6.086}) times more likely if it is an example of the binding motif than if it were an example of random sequence where each nucleotide is equally likely to occur.

[0168] In another example, if the observed sequence were GATTACAG (SEQ ID NO: 978), the bolded matrix would look like that below:

| | 1 | 2 | 3 | 4 | 5 | 6 | 7 | 8 |
|---|---|---|---|---|---|---|---|---|
| A | 1.644 | −4.000 | 1.700 | −3.000 | 1.672 | −4.000 | 1.907 | −4.000 |
| C | −1.415 | 1.615 | −4.000 | 1.129 | −4.000 | 1.907 | −4.000 | 1.700 |
| G | −2.415 | −4.000 | −0.678 | −4.000 | −1.000 | −3.000 | −3.000 | −4.000 |
| T | −1.678 | −0.300 | −4.000 | 0.700 | −2.000 | −4.000 | −4.000 | −0.678 |

[0169] The sum of the bolded values is −4.907. The fact that this is negative indicates that the sequence is more likely to have arisen under the random model than under the motif modeled by the PSSM. Specifically, the ratio of the probability of seeing the sequence GATTACAG (SEQ ID NO: 978) under the binding site model to the probability of seeing it under a uniform random model is 2^{-4.907}, which equals 0.0333. In other words, the sequence would be about 30 (approximately 1/0.0333) times more likely to have arisen under the random model than under the PSSM model.

[0170] Another example is the sequence ACACACAC (SEQ ID NO:968). This sequence is shown in the matrix below:

| | 1 | 2 | 3 | 4 | 5 | 6 | 7 | 8 |
|---|---|---|---|---|---|---|---|---|
| A | 1.644 | −4.000 | 1.700 | −3.000 | 1.672 | −4.000 | 1.907 | −4.000 |
| C | −1.415 | 1.615 | −4.000 | 1.129 | −4.000 | 1.907 | −4.000 | 1.700 |
| G | −2.415 | −4.000 | −0.678 | −4.000 | −1.000 | −3.000 | −3.000 | −4.000 |
| T | −1.678 | −0.300 | −4.000 | 0.700 | −2.000 | −4.000 | −4.000 | −0.678 |

[0171] In this case, the total score is 13.274, the highest that can be found using this matrix. Thus, the sequence is 2^{13.274} (or more than 9905) times more likely to have arisen if the sequence is an hnRNP L binding site than if it came from random sequence.

[0172] A sequence logo representing the binding motif thus discovered appears below. This logo differs slightly from that in the Hui, et al. EMBO J. 2005 Jun. 1; 24(11):1988-98 paper, and is shown below

[0173] In some embodiments, the hnRNP L binding motif or binding site, described herein, comprises a consensus amino acid sequence shown in the above sequence plot. For example, such hnRNP L binding motif or binding site may comprise an 8-mer amino acid sequence of ACACACAC (SEQ ID NO: 968), ACATACAC (SEQ ID NO: 969), ATACACAC (SEQ ID NO: 970), ATATACAC (SEQ ID NO: 971), ACGCACAC (SEQ ID NO: 972), ACGTACAC (SEQ ID NO: 973), ATGCACAC (SEQ ID NO: 974), ATGTACAC (SEQ ID NO: 975), or X₁X₂X₃X₄X₅CAX₆ (SEQ ID NO: 976), wherein X₁ is A, C, or T, X₂ is C or T, X₃ is A or G, X₄ is C or T, X₅ is A, G, or T, and X₆ is C or T.

[0174] Any 8-character sequence (8-mer) can be given a log-likelihood score comparing the probability that the sequence is an example of an hnRNP L binding site to the probability that the sequence arose simply by chance. These log-scaled scores are summed across all positions of the motif, corresponding to the products of their probabilities. An 8-mer having a log-likelihood score of at least 10 means that, across the 8 positions of the motif, the probability of seeing the observed 8-mer is at least 1024 (or 2¹⁰) times more likely if it is an example of the binding motif than if it were an example of random sequence where each nucleotide is equally likely to occur. Similarly, a score of at least 6 means that the sequence is at least 64 (or 2⁶) times more likely to be an example of the motif than not.

[0175] Genomic sequences were obtained for all of the genes on the list in Table 1, by using biomaRt to query the GRCh38 assembly in the Ensembl genome database (see Appendices). Screening was carried out, using Perl scripts, to identify each 8-mer in each of the sequences that had high (>=6) or very-high (>=10) scores according to the PSSM representing hnRNP L binding motifs.

[0176] 24,426 alternative splicing events identified in at least one of the normal tissues tested in Castle, et al., Nature Genetics 40(12):1416-25, 2008 were obtained (see, for example, Castle, et al., Nature Genetics 40(12):1416-25, 2008). The flanking sequences provided for each splice event were matched to the downloaded sequences to identify the Castle splice events' positions in the genome.

[0177] A script was then written that compared the high-scoring motifs in each sequence to the locations of the Castle splice events in those genes.

### Castle Splice Site

[0178] A “Castle Splice Site” refers to any of the splicing events identified in Castle, et al., Nature Genetics 40(12):1416-25, 2008.

[0179] For example, in the gene CD38, position 15,824,682 on the forward strand of chromosome 4 in the GRCh38.p12 primary assembly, marks the start of the splice event called CD38_CASEX_1, a cassette exon (an exon that may be omitted or included in a given transcript; this is sometimes known as “exon skipping”). The sequence from position 15,824,682-15,825,016 corresponds to the potentially skipped exon sequence. Both of these positions, corresponding to both ends of the cassette exon, are counted as splice sites.

[0180] In another example, in the gene ST7, position 117,130,606 on the forward strand of chromosome 7, marks the start of the splice event called ST7_MUTEXEX_1, with mutually exclusive exons. Splice sites derived from this event include the 3′ end of the preceding exon, at 117,130,606; both ends of the first mutually exclusive exon, at 117,131,885 and 117,131,960; both ends of the second mutually exclusive exon, at 117,136,081 and 117,136,235; and the 5′ end of the following exon, at 117,138,435.

[0181] In another example, in the gene CACNA1G, position 50,619,008 on the forward strand of chromosome 17 markers the start of the splice event called CACNA1G_CASEX2_1, a “double cassette exon” event, in which two consecutive exons may be included or excluded. Splice sites derived from this event include the 3′ end of the preceding exon, at 50,619,008; the 5′ end of the first cassette exon, at 50,619,683; the 3′ end of the second cassette exon, at 50,621,775; and the 5′ end of the following exon, at 50,623,907.

[0182] Table 2 reports all of the SFARI genes that have a high-scoring hnRNP L motif within 500 bp of one of the Castle splice sites.

[0183] Table 3 reports all the genes that have a very high scoring putative hnRNP L-binding motif within 500 bp of one of the Castle splice sites. There are 152 of these.

[0184] Table 4 further connects the SFARI gene list with hnRNP L binding sites near splice events specifically observed in autism. There are 78 such genes.

[0185] Table 5 reports all the genes bearing hnRNP L binding sites within the SHANK-TSC-mTOR-ERK ASD disease module. There are 27 of these.

[0186] Goldani et al., Front Psychiatry. 2014 Aug. 12; 5:100.

[0187] Table 6 reports all the genes bearing hnRNP L binding sites that also comprise the SHANK-TSC ASD disease module (i, ii). There are 18 of these.
[0188] (i) Peça J, Feng G. Epub 2012 Mar. 20. Curr Opin Neurobiol. 2012 October; 22(5):866-72.
[0189] (ii) Sadakata et al., Int J Environ Res Public Health. 2013 Nov. 27; 10(12):6335-53.

[0190] From Parikshak, et al., Nature 540:423-7, 2016, genomic locations were obtained (with respect to the GRCh37 assembly) of 1,127 alternative splicing events, in 833 genes, with a false discovery rate below 0.5 in cerebral cortex of autism patients compared to normal control cortex samples. All SFARI genes that have a high-scoring hnRNP L binding motif within 500 bp of one of these splice sites that Parikshak, et al. have identified as alternatively spliced in cortex in autism spectrum disorders were then identified.

[0191] The RNA binding protein, RBFox1/A2BP1, binds to the hexamer UGCAUG (Lee, et al., Neuron 89(1):113-28, 2016; Auweter, et al. EMBO J. 25(1):163-73, 2006). The genomic sequences of the genes in Tables 2-4 were screened for TGCATG hexamers within 200 bp of any of the qualifying hnRNP L motifs that are near the splice sites.

[0192] Mutations in the conserved splicing factor FOX1 are linked to autism spectrum disorder (Davis L. K. et al. Am J Med Genet A. 2012;158A:1654-1661; Martin C. L. et al. Am J Med Genet B Neuropsychiatr Genet. 2007;144B:869-876 ;Voineagu I. et al. Nature. 2011;474:380-384; Zhang C. et al. Genes Dev. 2008;22:2550-2563). FIG. 1 is a schematic diagram summarizing the bioinformatic approach.

### Identification of Compounds to Treat Autism Spectrum Disorder

[0193] Compounds that modify hnRNP L levels are useful for the development of ASD/mental retardation/neurological disorders. Using Western Blot analysis, it has been observed that ascochlorin treatment of cultured rat primary cortical neurons results in increased levels of hnRNP L.

Cell-Based Assay for the Identification of Compounds that Affect hnRNP L Levels

[0194] A cell-based assay using cells and cell lines described herein is used for the identification of additional compounds that affect hnRNP L levels has been developed.

[0195] An exemplary method of screening for compounds that repair abnormally spliced genes resulting in or contributing to the severity of neurological disease, autism spectrum disorder, autism, a subset of autism patients (e.g. neurofibromatosis, tuberous sclerosis) is carried out as follows.

### Assay Steps:

[0196] 1. Identify or generate (e.g. CRISPR, introduction of a synthetic gene construct) a cell line with a specifically abnormally spliced gene.
[0197] 2. Identify or generate (e.g. CRISPR) a neuronal cell line (e.g. see table) with a specifically abnormally spliced gene.
[0198] 3. Using established methods, generate iPS derived neurons from relevant patient sample, e.g. biopsy (e.g. skin) or stem cells (isolated from blood)
[0199] 4. Patients referred to above include those with:
   [0200] Neurological Disease
      [0201] Spliceopathy induced neurological disease (diagnosed by whole genome sequencing, RNA seq, PCR, etc)
      [0202] Autism spectrum disorder
      [0203] Autism associated with or caused by a specific splicing event
         [0204] e.g., Tuberous sclerosis
         [0205] e.g., Neurofibromatosis
         [0206] e.g,. subset of patient with spliceopathy of an autism associated gene
[0207] 5. Plate cells in a multiwell plate (e.g. 96, 384, 1536)
[0208] 6. Incubate cells (e.g. in triplicate) in the presence and absence of a fixed concentration of compound (e.g. 10-4M, 10-5M, 10-6M) for a specified period of time (e.g. 6 hrs, 12 hrs, 24 hrs, 3 days, 6 days).
[0209] 7. Compounds include those approved for human use (e.g. FDA approved, European equivalent, etc), compounds established to be safe in man, safe in animal models, analogs of the above, collections of small molecules (e.g. MW<1000, MW<500).
[0210] 8. Assess the splicing pattern of one or more genes (e.g. Prepare RNA and cDNA corresponding to each well, using transcriptome analysis, multiplex PCR or PCR).
[0211] 9. With positive compounds:
   [0212] Repeat and assess concentration dependent response. Assess analog and derivative activity.
      [0213] An exemplary method of screening for compounds that elevate the level of a targeted RNA binding protein acting alone or in combination to modulate splicing (e.g., hnRNPL alone or in complex with other RNA binding proteins to repair abnormally spliced genes contributing to neurological disease) is carried out as follows.

### Assay Steps:

[0214] 1. Plate cells in a multiwell plate (e.g. 96, 384, 1536) which express mRNA or protein corresponding to the relevant RNA binding protein (e.g. hnRNPL)
   [0215] Heterologous cell line
   [0216] Neuronal cell line
   [0217] Fibroblast derived cell line (from control or affected subject)
   [0218] Fibroblast derived neuron (from control or affected subject)
   [0219] iPS derived cell line (from control or affected subject)
   [0220] iPS derived neuron (from control or affected subject)
   [0221] primary neuron (human, rat, mouse, etc)
[0222] 2. Incubate cells (e.g. in triplicate) in the presence and absence of a fixed concentration of compound (e.g. 10-4M, 10-5M, 10-6M) for a specified period of time (e.g. 6 hrs, 12 hrs, 24 hrs, 3 days, 6 days).
[0223] 3. Compounds include those approved for human use (e.g. FDA approved, European equivalent, etc), compounds established to be safe in man, safe in animals, analogs of the above, collections of small molecules (e.g. MW<1000, MW<500).
[0224] 4. Measure the increase in the corresponding mRNA or protein using established methods
   [0225] (e.g., PCR, ELISA, luciferase reporter gene activity.
[0226] 5. Compounds that significantly increase mRNA or protein will be assessed for effects on splicing as detailed above.

[0227] Ascochlorin and/or its derivatives can promote the maintenance of normal brain physiology by targeting hnRNP L and/or components of the coordinated hnRNP L-regulated pathway(s). The compounds and methods described herein provide pharmacological leads to help treat autism spectrum disorder and additional neurological and psychiatric disorders.

### Definitions

[0228] Unless specifically defined otherwise, all technical and scientific terms used herein shall be taken to have the same meaning as commonly understood by one of ordinary skill in the art (e.g., in cell culture, molecular genetics, and biochemistry).

[0229] As used herein, the term “about” in the context of a numerical value or range means ±10% of the numerical value or range recited or claimed, unless the context requires a more limited range.

[0230] In the descriptions above and in the claims, phrases such as “at least one of” or “one or more of” may occur followed by a conjunctive list of elements or features. The term “and/or” may also occur in a list of two or more elements or features. Unless otherwise implicitly or explicitly contradicted by the context in which it is used, such a phrase is intended to mean any of the listed elements or features individually or any of the recited elements or features in combination with any of the other recited elements or features. For example, the phrases “at least one of A and B;” “one or more of A and B;” and “A and/or B” are each intended to mean “A alone, B alone, or A and B together.” A similar interpretation is also intended for lists including three or more items. For example, the phrases “at least one of A, B, and C;” “one or more of A, B, and C;” and “A, B, and/or C” are each intended to mean “A alone, B alone, C alone, A and B together, A and C together, B and C together, or A and B and C together.” In addition, use of the term “based on,” above and in the claims is intended to mean, “based at least in part on,” such that an unrecited feature or element is also permissible

[0231] It is understood that where a parameter range is provided, all integers within that range, and tenths thereof, are also provided by the invention. For example, “0.2-5 mg” is a disclosure of 0.2 mg, 0.3 mg, 0.4 mg, 0.5 mg, 0.6 mg etc. up to and including 5.0 mg.

[0232] A small molecule is a compound that is less than 2000 daltons in mass. The molecular mass of the small molecule is preferably less than 1000 daltons, more preferably less than 600 daltons, e.g., the compound is less than 500 daltons, 400 daltons, 300 daltons, 200 daltons, or 100 daltons.

[0233] As used herein, an “isolated” or “purified” nucleic acid molecule, polynucleotide, polypeptide, or protein, is substantially free of other cellular material, or culture medium when produced by recombinant techniques, or chemical precursors or other chemicals when chemically synthesized. Purified compounds are at least 60% by weight (dry weight) the compound of interest. Preferably, the preparation is at least 75%, more preferably at least 90%, and most preferably at least 99%, by weight the compound of interest. For example, a purified compound is one that is at least 90%, 91%, 92%, 93%, 94%, 95%, 98%, 99%, or 100% (w/w) of the desired compound by weight. Purity is measured by any appropriate standard method, for example, by column chromatography, thin layer chromatography, or high-performance liquid chromatography (HPLC) analysis. A purified or isolated polynucleotide (ribonucleic acid (RNA) or deoxyribonucleic acid (DNA)) is free of the genes or sequences that flank it in its naturally-occurring state. A purified or isolated protein or polypeptide is free of the amino acid sequences that flank it in its naturally-occuring state. Purified also defines a degree of sterility that is safe for administration to a human subject, e.g., lacking infectious or toxic agents.

[0234] Similarly, by “substantially pure” is meant a nucleotide or polypeptide that has been separated from the components that naturally accompany it. Typically, the nucleotides and polypeptides are substantially pure when they are at least 60%, 70%, 80%, 90%, 95%, or even 99%, by weight, free from the proteins and naturally-occurring organic molecules with they are naturally associated.

[0235] The transitional term “comprising,” which is synonymous with “including,” “containing,” or “characterized by,” is inclusive or open-ended and does not exclude additional, unrecited elements or method steps. By contrast, the transitional phrase “consisting of” excludes any element, step, or ingredient not specified in the claim. The transitional phrase “consisting essentially of” limits the scope of a claim to the specified materials or steps “and those that do not materially affect the basic and novel characteristic(s)” of the claimed invention.

[0236] The terms “subject,” “patient,” “individual,” and the like as used herein are not intended to be limiting and can be generally interchanged. That is, an individual described as a “patient” does not necessarily have a given disease, but may be merely seeking medical advice.

[0237] The term “subject” as used herein includes a patient with a neurological disease. More particularly, the “subject” may include a patient with autism. Autism was first described by Leo Kanner in 1943 and simultaneously by Asperger. Since then, the core symptoms have remained stable. The diagnostic criteria for Autism Spectrum disorder, based on DSM-5 are summarized below:
[0238] Social Communication and Social Interaction include:
   [0239] Deficits in social emotional reciprocity;
   [0240] Deficits in non-verbal communication; and
   [0241] Deficits in developing, maintaining and understanding relationships.

[0242] Must have all 3 symptoms.
[0243] Restricted and Repetitive Behavior including:
   [0244] Stereotyped movement or speech;
   [0245] Insistence on sameness, routines, rituals;
   [0246] Restricted, fixated interests; and
   [0247] Atypical sensory reactivity

[0248] Must have 2 of 4 symptoms

[0249] As per the American Psychiatric Association, symptoms must be present from early childhood and significantly impact function.

[0250] The genetics underlying autism are complex as indicated below.
[0251] Familial incidence (sibling risk ˜8-12%), High risk sib studies 20%
[0252] Twin studies—monozygotic (35-95%) vs. dizygotic (0-25%)
[0253] Heritability is estimated at 60-90%

[0254] The vast majority of ASD patients carry a clinical but not a genetic diagnosis. With the exponential growth in DNA sequencing capabilities and the decreasing cost of sequencing, new genetic information such as that described herein is emerging. For example, certain disease cohorts with a high occurrence of ASD carry a mutation that is the molecular basis of the accompanying disorder as well as ASD. These ASD subgroups include but are not limited to patients with neurofibromatosis and tuberous sclerosis. In each of these cases a significant fraction of the mutations in the target gene results in spliceopathy. In addition, each of these target genes include hnNPL binding sites raising the possibility that ascochlorin or a related compound that modulates hnRNP L expression/levels could abrogate the spliceopathy and in turn ameliorate the resulting disease.

[0255] Accordingly, as used herein, the “patient to be treated” may have a neurological disease. In some embodiments, the “patient” may have a clinical diagnosis of ASD. In some embodiments, the “patient” may have a mutation in a putative ASD target gene which includes hnRNPL binding sites (see Tables 2, 3 and 4). In some embodiments, the “patient” may have a mutation in the target gene which results in spliceopathy. In some embodiments, the “patient” may include known cohorts with neurofibromatosis and tuberous sclerosis who carry a mutation resulting in spliceopathy of the target gene and carry a clinical diagnosis of ASD. Based on ongoing sequencing of large ASD cohorts, it may be anticipated that there will be an expanding number of ASD patient subgroups who fulfill the criteria listed above and are thus candidates for a therapeutic response to ascochlorin and derivatives.

[0256] As used herein, the singular forms “a,” “an,” and “the” include the plural reference unless the context clearly dictates otherwise. Thus, for example, a reference to “a disease,” “a disease state”, or “a nucleic acid” is a reference to one or more such embodiments, and includes equivalents thereof known to those skilled in the art and so forth.

[0257] As used herein, “treating” encompasses, e.g., inhibition, regression, or stasis of the progression of a disorder. Treating also encompasses the prevention or amelioration of any symptom or symptoms of the disorder. As used herein, “inhibition” of disease progression or a disease complication in a subject means preventing or reducing the disease progression and/or disease complication in the subject.

[0258] As used herein, a “symptom” associated with a disorder includes any clinical or laboratory manifestation associated with the disorder, and is not limited to what the subject can feel or observe.

[0259] As used herein, “effective” when referring to an amount of a therapeutic compound refers to the quantity of the compound that is sufficient to yield a desired therapeutic response without undue adverse side effects (such as toxicity, irritation, or allergic response) commensurate with a reasonable benefit/risk ratio when used in the manner of this disclosure.

[0260] As used herein, “pharmaceutically acceptable” carrier or excipient refers to a carrier or excipient that is suitable for use with humans and/or animals without undue adverse side effects (such as toxicity, irritation, and allergic response) commensurate with a reasonable benefit/risk ratio. It can be, e.g., a pharmaceutically acceptable solvent, suspending agent or vehicle, for delivering the instant compounds to the subject.

[0261] Examples are provided below to facilitate a more complete understanding of the invention. The following examples illustrate the exemplary modes of making and practicing the invention. However, the scope of the invention is not limited to specific embodiments disclosed in these Examples, which are for purposes of illustration only, since alternative methods can be utilized to obtain similar results.

[0262] The term “neurological disorder or disease” as used herein refers to a disorder, disease or condition which directly or indirectly affects the normal functioning or anatomy of a subject's nervous system, including, but not limited to, the brain. In one embodiment, the neurological disorder or disease is a neurodevelopmental disorder.

[0263] An example of a neurological disorder or disease is autism. Another example of a neurological disorder or disease is autism spectrum disorder. In other examples, the neurological disorder or disease is epilepsy, schizophrenia or mental retardation.

[0264] Autism spectrum disorder (ASD) is a range of complex neurodevelopment disorders, characterized by social impairments, communication difficulties, and restricted, repetitive, and stereotyped patterns of behavior. Autism (also known as autistic disorder or classical ASD) is the most severe form of ASD. Other conditions along the spectrum include Asperger syndrome, childhood disintegrative disorder and pervasive developmental disorder not otherwise specified (also referred to as PDD-NOS), and Chromosome 15q11.2-13.1 duplication syndrome (dup15q syndrome).

[0265] The phrase “treating a neurological disorder or disease” as used herein includes, but is not limited to, reversing, alleviating or inhibiting the progression of a neurological disorder or disease or conditions associated with a neurological disorder or disease. As used herein, and as well understood in the art, “to treat” or “treatment” is an approach for obtaining beneficial or desired results, including clinical results. Beneficial or desired clinical results can include, but are not limited to, alleviation or amelioration of one or more symptoms or conditions, diminishment of extent of disease, stabilized (i.e. not worsening) state of disease, preventing spread of disease, delay or slowing of disease progression, amelioration or palliation of the disease state, and remission (whether partial or total), whether detectable or undetectable. “Treatment” can also mean prolonging survival as compared to expected survival if not receiving treatment.

[0266] Treating a neurological disorder or disease includes preventing the occurrence of a neurological disorder or disease or symptoms or conditions associated with a neurological disorder or disease or preventing worsening of the severity of a neurological disorder or disease or conditions associated with a neurological disorder or disease.

[0267] The term “neurological function” as used herein refers to the functioning and/or activity of a subject's nervous system.

[0268] The term “improving neurological function” as used herein refers to improving the structure, function and/or activity of a subject's nervous system. In one embodiment, improving neurological function includes improving neurodevelopment and/or improving behavior.

[0269] The term “subject” as used herein refers to any member of the animal kingdom, such as a mammal. In one embodiment, the subject is a human. In another embodiment, the subject is a rodent, e.g., mouse or rat, or another animal such as animal model for ASD or intellectual disability.

[0270] The term “a cell” includes a single cell as well as a plurality or population of cells. Administering a modulator or an agent to a cell includes both in vitro and in vivo administrations.

[0271] The modulators and agents described herein may be formulated into pharmaceutical compositions for administration to subjects and/or use in subjects in a biologically compatible form suitable for administration in vivo. The compositions described herein can be prepared by per se known methods for the preparation of pharmaceutically acceptable compositions that can be administered to subjects, such that an effective quantity of the active substance is combined in a mixture with a pharmaceutically acceptable vehicle. Suitable vehicles are described, for example, in Remington's Pharmaceutical Sciences (Remington's Pharmaceutical Sciences, 20th ed., Mack Publishing Company, Easton, Pa., USA, 2000). On this basis, the compositions include, albeit not exclusively, solutions of the substances in association with one or more pharmaceutically acceptable vehicles or diluents, and contained in buffered solutions with a suitable pH and iso-osmotic with the physiological fluids.

[0272] Modulators and agents described herein are formulated into pharmaceutical compositions for administration to the brain or central nervous system of a subject. Modulators, agents and pharmaceutical compositions which cannot penetrate the blood-brain barrier can be effectively administered by an intraventricular route or other appropriate delivery system suitable for administration to the brain.

[0273] Pharmaceutical compositions include, without limitation, lyophilized powders or aqueous or non-aqueous sterile injectable solutions or suspensions, which may further contain antioxidants, buffers, bacteriostats and solutes that render the compositions substantially compatible with the tissues or the blood of an intended recipient. Other components that may be present in such compositions include water, surfactants (such as Tween), alcohols, polyols, glycerin and vegetable oils, for example. Extemporaneous injection solutions and suspensions may be prepared from sterile powders, granules, tablets, or concentrated solutions or suspensions. Proteins may be supplied, for example but not by way of limitation, as a lyophilized powder which is reconstituted with sterile water or saline prior to administration to the patient.

[0274] Pharmaceutical compositions may comprise a pharmaceutically acceptable carrier. Suitable pharmaceutically acceptable carriers include essentially chemically inert and nontoxic compositions that do not interfere with the effectiveness of the biological activity of the pharmaceutical composition. Examples of suitable pharmaceutical carriers include, but are not limited to, water, saline solutions, glycerol solutions, ethanol, N-(1(2,3-dioleyloxy)propyl)N,N,N-trimethylammonium chloride (DOTMA), diolesylphosphotidyl-ethanolamine (DOPE), and liposomes. Such compositions should contain a therapeutically effective amount of the compound, together with a suitable amount of carrier so as to provide the form for direct administration to the patient.

[0275] The compositions may be in the form of a pharmaceutically acceptable salt which includes, without limitation, those formed with free amino groups such as those derived from hydrochloric, phosphoric, acetic, oxalic, tartaric acids, etc., and those formed with free carboxyl groups such as those derived from sodium, potassium, ammonium, calcium, ferric hydroxides, isopropylamine, triethylamine, 2-ethylarnino ethanol, histidine, procaine, etc.

[0276] The modulators, agents and/or pharmaceutical compositions described herein may be administered to, or used in, living organisms including humans, and animals. The term “subject” or “animal” as used herein refers to any member of the animal kingdom, in one embodiment a mammal such as a human being.

[0277] Administration of an “effective amount” of the modulators, agents and/or pharmaceutical compositions is defined as an amount effective, at dosages and for periods of time necessary to achieve the desired result. For example, an effective amount of a substance may vary according to factors such as the disease state, age, sex, and weight of the individual, and the ability of the recombinant protein to elicit a desired response in the individual. Dosage regime may be adjusted to provide the optimum therapeutic response. For example, several divided doses may be administered daily or the dose may be proportionally reduced as indicated by the exigencies of the therapeutic situation.

### Compounds for Treatment of ASD and Neurologic Disorders

[0278] The potential of ascochlorin (which increases hnRNP L levels ˜12x (Kang J. H. et al. J Proteome Res. 2006;5:2620-2631)) and its derivatives as for the treatment of autism spectrum disorder is underscored by the observation that hnRNP L directly interacts with FOX1. Pharmacological stabilization of the hnRNP L-FOX1 complex may be beneficial in cases where a decrease in the levels of FOX1 (˜5.9 x) is known to cause autism (Voineagu I. et al. Nature. 2011;474:380-384). Further highlighting the potential of ascochlorin and its derivatives for the treatment neurological disorders is evidence that some antibiotics have ancillary neuroprotective effects (Stock M. L. et al. Neuropharmacology. 2013;73C:174-182).

TABLE
Compounds of Formula 1
Formula 1

[chemical structure]

| Com- | | | | | |
|---|---|---|---|---|---|
| pound # | R₁ | R₂ | R₃ | R₄ | R₅ |
| 1 | CHO | H | H | Cl | H |
| 2 | CHO | H | H | Cl | OAc |
| 3 | CHO | H | H | Br | H |
| 4 | CHO | H | H | H | H |
| 5 | CHO | H | CH₃CO | Cl | H |
| 6 | CHO | H | CH₃ | Cl | H |
| 7 | CHO | CH₃ | CH₃ | Cl | H |
| 8 | CHO | CH₃CO | CH₃ | Cl | H |
| 9 | CHO | CH₃ | CH₃CO | Cl | H |
| 10 | CHO | CH₃ | H | Cl | H |
| 11 | CHO | H | CH₃CH₂ | Cl | H |
| 12 | CHO | H | Allyl | Cl | H |
| 13 | CHO | H | Butyl | Cl | H |
| 14 | CHO | H | CH₂COOH | Cl | H |
| 15 | CHO | H | (CH₂)₂COOH | Cl | H |
| 16 | CHO | H | (CH₂)₃COOH | Cl | H |
| 17 | CHO | H | (CH₂)₄COOH | Cl | H |
| 18 | CHO | H | CH₂COOCH₃ | Cl | H |
| 19 | CHO | H | Nicotinoyl | Cl | H |
| 20 | CHO | H | Benzoyl | Cl | H |
| 21 | CHO | H | Isonicotinoyl | Cl | H |
| 22 | CHO | H | CH₂COOC₂H₅ | Cl | H |
| 23 | CHO | H | CH₂COOCH₃ | Cl | H |
| 24 | CHO | H | CH₂COOH | Cl | H |
| 25 | CHO | H | CHCH₃COOC₂H₅ | Cl | H |
| 26 | CHO | H | CHCH₃COOC₄H₉ | Cl | H |
| 27 | CHO | H | CHCH₂CH₃COOC₂H₅ | Cl | H |
| 28 | CHO | H | (CH₂)₃COOC₂H₅ | Cl | H |
| 29 | CHO | H | CHCH₃COOH | Cl | H |
| 30 | CHO | H | (CH₂)₃COOH | Cl | H |
| 31 | CHO | H | Nicotinoyl | Cl | H |
| 32 | CHO | H | COC₆H₄OCH₃ | Cl | H |
| 33 | CHO | H | COC₆H₄COOCH₃ | Cl | H |
| 34 | CHO | H | CON(C₂H₅) | Cl | H |
| 35 | CHO | H | COCH₂OC₆H₄Cl | Cl | H |
| 36 | CHO | H | Isonicotinoyl | Cl | H |
| 37 | CHO | H | Picolinyl | Cl | H |
| 38 | CHO | H | CH₃ | Cl | H |
| 39 | C₂H₂COCH₃ | H | H | Cl | O |
| 40 | CHO | H | CH₃CO | H | H |
| 41 | CHO | H | CH₃ | H | H |
| 42 | C₂H₂COCH₃ | H | CH₂COOH | Cl | O |
| 43 | CHO | CH₃CO | CH₃CO | Cl | H |
| 44 | C(OCH₃)₂ | H | CH₃CO | Cl | H |
| 45 | C(OCH₂CH₃)₂ | H | CH₃CO | Cl | H |
| 46 | C(OCH₂CH₃)₂ | H | CH₃ | Cl | H |
| 47 | C(O(CH₂)₃CH₃)₂ | H | CH₃ | Cl | H |
| 48 | [chemical structure] | H | CH₃ | Cl | H |
| 49 | CHO | H | (CH₂)₃CH₃ | Cl | H |
| 50 | CHO | H | CH₂CH₃ | Cl | H |
| 51 | CHO | H | CH₂CHCH₂ | Cl | H |
| 52 | CO₂H | H | H | Cl | H |

TABLE 3
Compounds of Formula 2
Formula 2

[chemical structure]

| Compound # | R₁ | R₂ | R₃ |
|---|---|---|---|
| 53 | Cl | H | H |
| 54 | H | H | H |
| 55 | Cl | H | OH |
| 56 | Cl | H | OAc |
| 57 | Cl | CH₃ | H |
| 58 | Cl | CH₃CO | H |
| 59 | H | CH₃ | H |
| 60 | H | CH₃CO | H |
| 61 | Cl | H | OCO(CH₃)₂ |
| 62 | Cl | H | OCOCH₂C(CH₃)₂ |

[0279] Additional compounds include, but are not limited to:

[0280] 3-chloro-4,6-dihydroxy-2-methyl-5-((2E,4E)-3-methyl-5-((1R,2R,6R)-1,2,6-trimethyl-3-oxocyclohexyl)penta-2,4-dien-1-yl)benzaldehyde;

[0281] 3-chloro-6-hydroxy-4-methoxy-2-methyl-5-((2E,4E)-3-methyl-5-((1R,2R,6R)-1,2,6-trimethyl-3-oxocyclohexyl)penta-2,4-dien-1-yl)benzaldehyde;

[0282] 2-(2-chloro-4-formyl-5-hydroxy-3-methyl-6-((2E,4E)-3-methyl-5-((1R,2R,6R)-1,2,6-trimethyl-3-oxocyclohexyl)penta-2,4-dien-1-yl)phenoxy)acetic acid;

[0283] 3-chloro-5-((2E,6E)-7-((S)-5,5-dimethyl-4-oxotetrahydrofuran-2-yl)-3-methylocta-2,6-dien-1-yl)-4,6-dihydroxy-2-methylbenzaldehyde;

[0284] (R,E)-5-(3-chloro-5-formyl-2,6-dihydroxy-4-methylphenyl)-3-methyl-1-((1S,2R,6R)-1,2,6-trimethyl-3-oxocyclohexyl)pent-3-en-2-yl butyrate;

[0285] 3-chloro-4,6-dihydroxy-5-((2E,6E)-7-((2R,3 S)-3-hydroxy-5,5-dimethyl-4-oxotetrahydrofuran-2-yl)-3-methylocta-2,6-dien-1-yl)-2-methylbenzaldehyde;

[0286] 3-chloro-5-((R,E)-4-(((2R,3R,4R,5S,6R)-3,4-dihydroxy-6-(hydroxymethyl)-5-methoxytetrahydro-2H-pyran-2-yl)oxy)-3-methyl-5-((1S,2R,6R)-1,2,6-trimethyl-3-oxocyclohexyl)pent-2-en-1-yl)-4,6-dihydroxy-2-methylbenzaldehyde;

[0287] 3-chloro-4,6-dihydroxy-5-((R,E)-4-hydroxy-3-methyl-5-((1S,2R,6R)-1,2,6-trimethyl-3-oxocyclohexyl)pent-2-en-1-yl)-2-methylbenzaldehyde;

[0288] 3-chloro-4,6-dihydroxy-5-((2E,4E)-5-((1S,2S,3S ,6R)-3-hydroxy-1,2,6-trimethyl-5-oxocyclohexyl)-3-methylpenta-2,4-dien-1-yl)-2-methylbenzaldehyde;

[0289] 3-chloro-4,6-dihydroxy-2-methyl-5-((2E,4E)-3-methyl-5-((1S ,2R,6R)-1,2,6-trimethyl-5-oxocyclohex-3-en-1-yl)penta-2,4-dien-1-yl)benzaldehyde;

[0290] 3-chloro-4,6-dihydroxy-5-((2E,4E)-5-((1S,2S,3S ,6R)-3-hydroxy-1,2,6-trimethyl-5-oxocyclohexyl)-3-methylpenta-2,4-dien-1-yl)-2-methylbenzaldehyde;

[0291] (E)-3-chloro-5-(3,7-dimethylocta-2,6-dien-1-yl)-4,6-dihydroxy-2-methylbenzaldehyde;

[0292] cefacetrile; cefotaxime; ciproflaxin; netilimicine; or a quinolone/fluoroquinolone compound.

TABLE 1
(881 Genes)
SFARI list of autism genes.

| | | SEQ | |
|---|---|---|---|
| Human Gene | Ensembl Identifier | ID NO | Accession Number* |
| ABAT | ENSG00000183044 | 1 | NP_001120920.1 |
| ABCA10 | ENSG00000154263 | 2 | NP_525021.3 |
| ABCA7 | ENSG00000064687 | 3 | NP_061985.2 |
| ACE | ENSG00000159640 | 4 | NP_000780.1 |
| ACHE | ENSG00000087085 | 5 | NP_000656.1 |
| ACTN4 | ENSG00000130402, | 6 | NP_004915.2 |
| | ENSG00000282844 | 7 | |
| ACY1 | ENSG00000243989 | 8 | NP_001185824.1 |
| ADA | ENSG00000196839 | 9 | NP_000013.2 |
| ADAMTS18 | ENSG00000140873 | 10 | NP_955387.1 |
| ADARB1 | ENSG00000197381 | 11 | NP_056648.1 |
| ADCY5 | ENSG00000173175 | 12 | NP_899200.1 |
| ADK | ENSG00000156110 | 13 | NP_001114.2 |
| ADNP | ENSG00000101126 | 14 | NP_056154.1 |
| ADORA2A | ENSG00000128271 | 15 | NP_000666.2 |
| ADORA3 | ENSG00000282608 | 16 | NP_065734.5 |
| ADRB2 | ENSG00000169252 | 17 | NP_000015.1 |
| ADSL | ENSG00000239900 | 18 | NP_000017.1 |
| AFF2 | ENSG00000155966 | 19 | NP_002016.2 |
| AFF4 | ENSG00000072364 | 20 | NP_055238.1 |
| AGAP1 | ENSG00000157985 | 21 | NP_001032208.1 |
| AGBL4 | ENSG00000186094 | 22 | NP_116174.3 |
| AGMO | ENSG00000187546 | 23 | NP_001004320.1 |
| AGTR2 | ENSG00000180772 | 24 | NP_000677.2 |
| AHDC1 | ENSG00000126705 | 25 | NP_001025053.1 |
| AHI1 | ENSG00000135541 | 26 | NP_001128302.1 |
| AKAP9 | ENSG00000127914 | 27 | NP_005742.4 |
| ALDH1A3 | ENSG00000184254 | 28 | NP_000684.2 |
| ALDH5A1 | ENSG00000112294 | 29 | NP_733936.1 |
| ALG6 | ENSG00000088035 | 30 | NP_037471.2 |
| ALOX5AP | ENSG00000132965 | 31 | NP_001191335.1 |
| AMPD1 | ENSG00000116748 | 32 | NP_000027.2 |
| AMT | ENSG00000145020 | 33 | NP_000472.2 |
| ANK2 | ENSG00000145362 | 34 | NP_001139.3 |
| ANK3 | ENSG00000151150 | 35 | NP_066267.2 |
| ANKRD11 | ENSG00000167522 | 36 | NP_001243111.1 |
| ANKS1B | ENSG00000185046 | 37 | NP_690001.3 |
| ANXA1 | ENSG00000135046 | 38 | NP_000691.1 |
| AP1S2 | ENSG00000182287 | 39 | NP_003907.3 |
| APBA2 | ENSG00000034053, | 40 | NP_005494.2 |
| | ENSG00000276495 | 41 | |
| APC | ENSG00000134982 | 42 | NP_001120982.1 |
| APH1A | ENSG00000117362 | 43 | NP_001071096.1 |
| APP | ENSG00000142192 | 44 | NP_000475.1 |
| AR | ENSG00000169083 | 45 | NP_000035.2 |
| ARHGAP11B | ENSG00000187951 | 46 | NP_001034930.1 |
| ARHGAP15 | ENSG00000075884 | 47 | NP_060930.3 |
| ARHGAP24 | ENSG00000138639 | 48 | NP_001020787.2 |
| ARHGAP32 | ENSG00000134909 | 49 | NP_001136157.1 |
| ARHGAP33 | ENSG00000004777 | 50 | NP_443180.2 |
| ARHGEF9 | ENSG00000131089 | 51 | NP_056000.1 |
| ARID1B | ENSG00000049618 | 52 | NP_065783.3 |
| ARNT2 | ENSG00000172379 | 53 | NP_055677.3 |
| ARX | ENSG00000004848 | 54 | NP_620689.1 |
| ASH1L | ENSG00000116539 | 55 | NP_060959.2 |
| ASMT | ENSG00000196433 | 56 | NP_004034.2 |
| ASS1 | ENSG00000130707 | 57 | NP_446464.1 |
| ASTN2 | ENSG00000148219 | 58 | NP_054729.3 |
| ASXL3 | ENSG00000141431 | 59 | NP_085135.1 |
| ATG7 | ENSG00000197548 | 60 | NP_006386.1 |
| ATP10A | ENSG00000206190 | 61 | NP_077816.1 |
| ATP1A3 | ENSG00000105409 | 62 | NP_001243143.1 |
| ATP2B2 | ENSG00000157087 | 63 | NP_001001331.1 |
| ATP8A1 | ENSG00000124406 | 64 | NP_006086.1 |
| ATRNL1 | ENSG00000107518 | 65 | NP_997186.1 |
| ATRX | ENSG00000085224 | 66 | NP_000480.3 |
| ATXN7 | ENSG00000163635 | 67 | NP_001170858.1 |
| AUTS2 | ENSG00000158321 | 68 | NP_056385.1 |
| AVP | ENSG00000101200 | 69 | NP_000481.2 |
| AVPR1A | ENSG00000166148 | 70 | NP_000697.1 |
| AVPR1B | ENSG00000198049 | 71 | NP_000698.1 |
| BAIAP2 | ENSG00000175866 | 72 | NP_059345.1 |
| BBS4 | ENSG00000140463 | 73 | NP_149017.2 |
| BCAS1 | ENSG00000064787 | 74 | NP_003648.2 |
| BCKDK | ENSG00000103507 | 75 | NP_005872.2 |
| BCL11A | ENSG00000119866 | 76 | NP_075044.2 |
| BCL2 | ENSG00000171791 | 77 | NP_000624.2 |
| BDNF | ENSG00000176697 | 78 | NP_001137282.1 |
| BIN1 | ENSG00000136717 | 79 | NP_647593.1 |
| BIRC6 | ENSG00000115760 | 80 | NP_057336.3 |
| BRAF | ENSG00000157764 | 81 | NP_004324.2 |
| BRCA2 | ENSG00000139618 | 82 | NP_000050.2 |
| BRINP1 | ENSG00000078725 | 83 | NP_055433.2 |
| BTAF1 | ENSG00000095564 | 84 | NP_003963.1 |
| BZRAP1 | ENSG00000005379 | 85 | NP_004749.2 |
| C11orf30 | ENSG00000158636 | 86 | NP_064578.2 |
| C12orf57 | ENSG00000111678 | 87 | NP_612434.1 |
| C15orf43 | ENSG00000167014 | 88 | NP_689661.1 |
| C3orf58 | ENSG00000181744 | 89 | NP_775823.1 |
| C4B | ENSG00000236625, | 90 | NP_001229752.1 |
| | ENSG00000224639, | 91 | |
| | ENSG00000228267, | 92 | |
| | ENSG00000228454, | 93 | |
| | ENSG00000224389 | 94 | |
| CA6 | ENSG00000131686 | 95 | NP_001257429.1 |
| CACNA1A | ENSG00000141837 | 96 | NP_075461.2 |
| CACNA1B | ENSG00000148408 | 97 | NP_000709.1 |
| CACNA1C | ENSG00000151067 | 98 | NP_955630.3 |
| CACNA1D | ENSG00000157388 | 99 | NP_000711.1 |
| CACNA1E | ENSG00000198216 | 100 | NP_001192222.1 |
| CACNA1F | ENSG00000102001 | 101 | NP_005174.2 |
| CACNA1G | ENSG00000006283 | 102 | NP_061496.2 |
| CACNA1H | ENSG00000196557 | 103 | NP_066921.2 |
| CACNA1I | ENSG00000100346 | 104 | NP_066919.2 |
| CACNA2D3 | ENSG00000157445 | 105 | NP_060868.2 |
| CACNB2 | ENSG00000165995 | 106 | NP_963 890.2 |
| CADM1 | ENSG00000182985 | 107 | NP_055148.3 |
| CADM2 | ENSG00000175161 | 108 | NP_694854.2 |
| CADPS2 | ENSG00000081803 | 109 | NP_001161412.1 |
| CAMK2A | ENSG00000070808 | 110 | NP_057065.2 |
| CAMK4 | ENSG00000152495 | 111 | NP_001735.1 |
| CAMSAP2 | ENSG00000118200 | 112 | NP_982284.1 |
| CAMTA1 | ENSG00000171735 | 113 | NP_056030.1 |
| CAPN12 | ENSG00000182472 | 114 | NP_653292.2 |
| CAPRIN1 | ENSG00000135387 | 115 | NP_005889.3 |
| CASC4 | ENSG00000166734 | 116 | NP_612432.2 |
| CASK | ENSG00000147044 | 117 | NP_003679.2 |
| CBS | ENSG00000160200 | 118 | NP_001171479.1 |
| CC2D1A | ENSG00000132024 | 119 | NP_060191.3 |
| CCDC64 | ENSG00000135127 | 120 | NP_997194.2 |
| CCDC88C | ENSG00000015133 | 121 | NP_001073883.2 |
| CCDC91 | ENSG00000123106 | 122 | NP_060788.3 |
| CCT4 | ENSG00000115484 | 123 | NP_006421.2 |
| CD38 | ENSG00000004468 | 124 | NP_001766.2 |
| CD44 | ENSG00000026508 | 125 | NP_000601.3 |
| CD99L2 | ENSG00000102181 | 126 | NP_001229543.1 |
| CDC42BPB | ENSG00000198752 | 127 | NP_006026.3 |
| CDH10 | ENSG00000040731 | 128 | NP_006718.2 |
| CDH11 | ENSG00000140937 | 129 | NP_001788.2 |
| CDH22 | ENSG00000149654 | 130 | NP_067071.1 |
| CDH8 | ENSG00000150394 | 131 | NP_001787.2 |
| CDH9 | ENSG00000113100 | 132 | NP_057363.3 |
| CDKL5 | ENSG00000008086 | 133 | NP_003150.1 |
| CDKN1B | ENSG00000111276 | 134 | NP_004055.1 |
| CECR2 | ENSG00000099954 | 135 | NP_113601.2 |
| CELF4 | ENSG00000101489 | 136 | NP_064565.1 |
| CELF6 | ENSG00000140488 | 137 | NP_443072.3 |
| CEP290 | ENSG00000198707 | 138 | NP_079390.3 |
| CEP41 | ENSG00000106477 | 139 | NP_061188.1 |
| CGNL1 | ENSG00000128849 | 140 | NP_116255.2 |
| CHD2 | ENSG00000173575 | 141 | NP_001262.3 |
| CHD7 | ENSG00000171316 | 142 | NP_060250.2 |
| CHD8 | ENSG00000100888 | 143 | NP_001164100.1 |
| CHKB | ENSG00000100288 | 144 | NP_005189.2 |
| CHRM3 | ENSG00000133019 | 145 | NP_000731.1 |
| CHRNA7 | ENSG00000175344 | 146 | NP_001177384.1 |
| CHRNB3 | ENSG00000147432 | 147 | NP_000740.1 |
| CHST5 | ENSG00000135702 | 148 | NP_078809.2 |
| CIB2 | ENSG00000136425 | 149 | NP_006374.1 |
| CLN8 | ENSG00000182372, | 150 | NP_061764.2 |
| | ENSG00000278220 | 151 | |
| CLSTN3 | ENSG00000139182 | 152 | NP_055533.2 |
| CLTCL1 | ENSG00000070371 | 153 | NP_009029.3 |
| CMIP | ENSG00000153815 | 154 | NP_938204.2 |
| CNKSR2 | ENSG00000149970 | 155 | NP_055742.2 |
| CNOT3 | ENSG00000277600, | 156 | NP_055331.1 |
| | ENSG00000274616, | 157 | |
| | ENSG00000277114, | 158 | |
| | ENSG00000088038, | 159 | |
| | ENSG00000273943, | 160 | |
| | ENSG00000274941, | 161 | |
| | ENSG00000274176, | 162 | |
| | ENSG00000277615, | 163 | |
| | ENSG00000276082, | 164 | |
| | ENSG00000275979 | 165 | |
| CNR1 | ENSG00000118432 | 166 | NP_001153698.1 |
| CNR2 | ENSG00000188822 | 167 | NP_001832.1 |
| CNTN3 | ENSG00000113805 | 168 | NP_065923.1 |
| CNTN4 | ENSG00000144619 | 169 | NP_783200.1 |
| CNTN5 | ENSG00000149972 | 170 | NP_001230199.1 |
| CNTN6 | ENSG00000134115 | 171 | NP_055276.1 |
| CNTNAP2 | ENSG00000278728, | 172 | NP_054860.1 |
| | ENSG00000174469 | 173 | |
| CNTNAP3 | ENSG00000106714 | 174 | NP_387504.2 |
| CNTNAP4 | ENSG00000152910 | 175 | NP_207837.2 |
| CNTNAP5 | ENSG00000155052 | 176 | NP_570129.1 |
| CREBBP | ENSG00000005339 | 177 | NP_004371.2 |
| CRHR2 | ENSG00000106113 | 178 | NP_001189404.1 |
| CSMD1 | ENSG00000183117 | 179 | NP_150094.5 |
| CSNK1D | ENSG00000141551 | 180 | NP_001884.2 |
| CTCF | ENSG00000102974 | 181 | NP_006556.1 |
| CTNNA3 | ENSG00000183230 | 182 | NP_037398.2 |
| CTNNB1 | ENSG00000168036 | 183 | NP_001091680.1 |
| CTNND2 | ENSG00000169862 | 184 | NP_001323.1 |
| CTTNBP2 | ENSG00000077063 | 185 | NP_219499.1 |
| CUL3 | ENSG00000036257 | 186 | NP_001244127.1 |
| CUL7 | ENSG00000044090 | 187 | NP_001161842.1 |
| CUX1 | ENSG00000257923 | 188 | NP_001189472.1 |
| CX3CR1 | ENSG00000168329 | 189 | NP_001164645.1 |
| CXCR3 | ENSG00000186810 | 190 | NP_001136269.1 |
| CYFIP1 | ENSG00000273749, | 191 | NP_055423.1 |
| | ENSG00000280618 | 192 | |
| CYLC2 | ENSG00000155833 | 193 | NP_001331.1 |
| CYP11B1 | ENSG00000160882 | 194 | NP_000488.3 |
| DAB1 | ENSG00000173406 | 195 | NP_066566.3 |
| DAGLA | ENSG00000134780 | 196 | NP_006124.1 |
| DAPK1 | ENSG00000196730 | 197 | NP_004929.2 |
| DAPP1 | ENSG00000070190 | 198 | NP_055210.2 |
| DCTN5 | ENSG00000166847 | 199 | NP_115875.1 |
| DCUN1D1 | ENSG00000043093 | 200 | NP_065691.2 |
| DCX | ENSG00000077279 | 201 | NP_000546.2 |
| DDC | ENSG00000132437 | 202 | NP_001076440.1 |
| DDX11 | ENSG00000013573 | 203 | NP_689651.1 |
| DDX3X | ENSG00000215301 | 204 | NP_001347.3 |
| DDX53 | ENSG00000184735 | 205 | NP_874358.2 |
| DEAF1 | ENSG00000177030, | 206 | NP_066288.2 |
| | ENSG00000282712 | 207 | |
| DENR | ENSG00000139726 | 208 | NP_003668.2 |
| DEPDC5 | ENSG00000100150 | 209 | NP_001229825.1 |
| DGKK | ENSG00000274588 | 210 | NP_001013764.1 |
| DGKZ | ENSG00000149091 | 211 | NP_001099010.1 |
| DHCR7 | ENSG00000172893 | 212 | NP_001351.2 |
| DIAPH3 | ENSG00000139734 | 213 | NP_001035982.1 |
| DIP2A | ENSG00000160305 | 214 | NP_055966.2 |
| DISC1 | ENSG00000162946 | 215 | NP_001158009.1 |
| DIXDC1 | ENSG00000150764 | 216 | NP_001033043.1 |
| DLG1 | ENSG00000075711 | 217 | NP_004078.2 |
| DLG4 | ENSG00000132535 | 218 | NP_001356.1 |
| DLGAP1 | ENSG00000170579 | 219 | NP_001229690.1 |
| DLGAP2 | ENSG00000198010, | 220 | NP_004736.2 |
| | ENSG00000282152, | 221 | |
| | ENSG00000274161, | 222 | |
| | ENSG00000282318 | 223 | |
| DLGAP3 | ENSG00000116544 | 224 | NP_001073887.1 |
| DLX1 | ENSG00000144355 | 225 | NP_835221.2 |
| DLX2 | ENSG00000115844 | 226 | NP_004396.1 |
| DLX6 | ENSG00000006377 | 227 | NP_005213.3 |
| DMD | ENSG00000198947 | 228 | NP_003997.1 |
| DMPK | ENSG00000104936 | 229 | NP_001075032.1 |
| DMXL2 | ENSG00000104093 | 230 | NP_001167587.1 |
| DNAH10 | ENSG00000197653, | 231 | NP_997320.2 |
| | ENSG00000281935 | 232 | |
| DNAJC19 | ENSG00000205981 | 233 | NP_660304.1 |
| DNER | ENSG00000187957 | 234 | NP_620711.3 |
| DNM1L | ENSG00000087470 | 235 | NP_036192.2 |
| DNMT3A | ENSG00000119772 | 236 | NP_072046.2 |
| DOCK1 | ENSG00000150760 | 237 | NP_001371.1 |
| DOCK10 | ENSG00000135905 | 238 | NP_055504.2 |
| DOCK4 | ENSG00000128512 | 239 | NP_055520.3 |
| DOCK8 | ENSG00000107099 | 240 | NP_982272.2 |
| DOLK | ENSG00000175283 | 241 | NP_055723.1 |
| DPP10 | ENSG00000175497 | 242 | NP_001171505.1 |
| DPP4 | ENSG00000197635 | 243 | NP_001926.2 |
| DPP6 | ENSG00000130226, | 244 | NP_570629.2 |
| | ENSG00000282974 | 245 | |
| DPYD | ENSG00000188641 | 246 | NP_000101.2 |
| DRD1 | ENSG00000184845 | 247 | NP_000785.1 |
| DRD2 | ENSG00000149295 | 248 | NP_000786.1 |
| DRD3 | ENSG00000151577 | 249 | NP_000787.2 |
| DSCAM | ENSG00000171587 | 250 | NP_001380.2 |
| DST | ENSG00000151914 | 251 | NP_056363.2 |
| DUSP15 | ENSG00000149599 | 252 | NP_542178.2 |
| DUSP22 | ENSG00000112679 | 253 | NP_064570.1 |
| DVL1 | ENSG00000107404 | 254 | NP_004412.2 |
| DVL3 | ENSG00000161202 | 255 | NP_004414.3 |
| DYDC1 | ENSG00000170788 | 256 | NP_620167.1 |
| DYDC2 | ENSG00000133665 | 257 | NP_001256971.1 |
| DYRK1A | ENSG00000157540 | 258 | NP_001387.2 |
| EEF1A2 | ENSG00000101210 | 259 | NP_001949.1 |
| EFR3A | ENSG00000132294 | 260 | NP_055952.2 |
| EGR2 | ENSG00000122877 | 261 | NP_001129649.1 |
| EHMT1 | ENSG00000181090 | 262 | NP_079033.4 |
| EIF3G | ENSG00000130811 | 263 | NP_003746.2 |
| EIF4E | ENSG00000151247 | 264 | NP_001124151.1 |
| EIF4EBP2 | ENSG00000148730 | 265 | NP_004087.1 |
| ELAVL2 | ENSG00000107105 | 266 | NP_004423.2 |
| ELAVL3 | ENSG00000196361 | 267 | NP_001411.2 |
| ELP4 | ENSG00000109911 | 268 | NP_061913.3 |
| EML1 | ENSG00000066629 | 269 | NP_001008707.1 |
| EN2 | ENSG00000164778 | 270 | NP_001418.2 |
| EP300 | ENSG00000100393 | 271 | NP_001420.2 |
| EP400 | ENSG00000183495 | 272 | NP_056224.3 |
| EPC2 | ENSG00000135999 | 273 | NP_056445.3 |
| EPHA6 | ENSG00000080224 | 274 | NP_001073917.2 |
| EPHB2 | ENSG00000133216 | 275 | NP_004433.2 |
| EPHB6 | ENSG00000275482, | 276 | NP_004436.2 |
| | ENSG00000106123 | 277 | |
| EPS8 | ENSG00000151491 | 278 | NP_004438.3 |
| ERBB4 | ENSG00000178568 | 279 | NP_005226.1 |
| ERBIN | ENSG00000112851 | 280 | NP_001240628.1 |
| ERG | ENSG00000157554 | 281 | NP_001129626.1 |
| ERMN | ENSG00000136541 | 282 | NP_001009959.1 |
| ESR1 | ENSG00000091831 | 283 | NP_001116212.1 |
| ESR2 | ENSG00000140009 | 284 | NP_001428.1 |
| ESRRB | ENSG00000119715 | 285 | NP_004443.3 |
| ETFB | ENSG00000105379 | 286 | NP_001014763.1 |
| EXOC3 | ENSG00000180104 | 287 | NP_009208.2 |
| EXOC5 | ENSG00000070367 | 288 | NP_006535.1 |
| EXOC6 | ENSG00000138190 | 289 | NP_061926.3 |
| EXOC6B | ENSG00000144036 | 290 | NP_056004.1 |
| EXT1 | ENSG00000182197 | 291 | NP_000118.2 |
| F13A1 | ENSG00000124491 | 292 | NP_000120.2 |
| FABP3 | ENSG00000121769 | 293 | NP_004093.1 |
| FABP5 | ENSG00000164687 | 294 | NP_001435.1 |
| FABP7 | ENSG00000164434 | 295 | NP_001437.1 |
| FAM135B | ENSG00000147724 | 296 | NP_056996.2 |
| FAM92B | ENSG00000153789 | 297 | NP_940893.1 |
| FAN1 | ENSG00000198690, | 298 | NP_055782.3 |
| | ENSG00000276787 | 299 | |
| FAT1 | ENSG00000083857 | 300 | NP_005236.2 |
| FBN1 | ENSG00000166147 | 301 | NP_000129.3 |
| FBXO15 | ENSG00000141665 | 302 | NP_001136430.1 |
| FBXO33 | ENSG00000165355 | 303 | NP_976046.1 |
| FBXO40 | ENSG00000163833 | 304 | NP_057382.2 |
| FER | ENSG00000151422 | 305 | NP_005237.2 |
| FEZF2 | ENSG00000153266 | 306 | NP_060478.3 |
| FGA | ENSG00000171560 | 307 | NP_000499.1 |
| FGD1 | ENSG00000102302 | 308 | NP_004454.2 |
| FGFBP3 | ENSG00000174721 | 309 | NP_689642.3 |
| FHIT | ENSG00000189283 | 310 | NP_001159715.1 |
| FLT1 | ENSG00000102755 | 311 | NP_002010.2 |
| FMR1 | ENSG00000102081 | 312 | NP_002015.1 |
| FOLH1 | ENSG00000086205 | 313 | NP_004467.1 |
| FOXG1 | ENSG00000176165 | 314 | NP_005240.3 |
| FOXP1 | ENSG00000114861 | 315 | NP_001231739.1 |
| FOXP2 | ENSG00000128573 | 316 | NP_683696.2 |
| FRK | ENSG00000111816 | 317 | NP_002022.1 |
| FRMPD4 | ENSG00000169933 | 318 | NP_055543.2 |
| GABRA1 | ENSG00000022355 | 319 | NP_001121115.1 |
| GABRA3 | ENS G00000011677 | 320 | NP_000799.1 |
| GABRA4 | ENSG00000109158 | 321 | NP_000800.2 |
| GABRA5 | ENSG00000186297 | 322 | NP_001158509.1 |
| GABRB1 | ENSG00000163288 | 323 | NP_000803.2 |
| GABRB3 | ENSG00000166206 | 324 | NP_068712.1 |
| GABRQ | ENSG00000268089 | 325 | NP_061028.2 |
| GAD1 | ENSG00000128683 | 326 | NP_000808.2 |
| GADD45B | ENSG00000099860 | 327 | NP_056490.2 |
| GALNT13 | ENSG00000144278 | 328 | NP_443149.2 |
| GALNT14 | ENSG00000158089 | 329 | NP_001240755.1 |
| GAN | ENSG00000261609 | 330 | NP_071324.1 |
| GAP43 | ENSG00000172020 | 331 | NP_001123536.1 |
| GAS2 | ENSG00000148935 | 332 | NP_001137302.1 |
| GATM | ENSG00000171766 | 333 | NP_001473.1 |
| GDA | ENSG00000119125 | 334 | NP_001229434.1 |
| GIGYF1 | ENSG00000146830 | 335 | NP_072096.2 |
| GIGYF2 | ENSG00000204120 | 336 | NP_001096617.1 |
| GLIS1 | ENSG00000174332 | 337 | NP_671726.2 |
| GLO1 | ENSG00000124767 | 338 | NP_006699.2 |
| GLRA2 | ENSG00000101958 | 339 | NP_001112357.1 |
| GNA14 | ENSG00000156049 | 340 | NP_004288.1 |
| GNAS | ENSG00000087460 | 341 | NP_536350.2 |
| GNB1L | ENSG00000185838 | 342 | NP_443730.1 |
| GPC4 | ENSG00000076716 | 343 | NP_001439.2 |
| GPC6 | ENSG00000183098 | 344 | NP_005699.1 |
| GPD2 | ENSG00000115159 | 345 | NP_001076581.2 |
| GPHN | ENSG00000171723 | 346 | NP_065857.1 |
| GPR139 | ENSG00000180269 | 347 | NP_001002911.1 |
| GPR37 | ENSG00000170775 | 348 | NP_005293.1 |
| GPR85 | ENSG00000164604 | 349 | NP_061843.3 |
| GPX1 | ENSG00000233276 | 350 | NP_000572.2 |
| GRID1 | ENSG00000182771 | 351 | NP_060021.1 |
| GRID2 | ENSG00000152208 | 352 | NP_001501.2 |
| GRID2IP | ENSG00000215045 | 353 | NP_001138590.1 |
| GRIK2 | ENSG00000164418 | 354 | NP_068775.1 |
| GRIK3 | ENSG00000163873 | 355 | NP_000822.2 |
| GRIK4 | ENSG00000149403 | 356 | NP_055434.2 |
| GRIK5 | ENSG00000105737 | 357 | NP_002079.3 |
| GRIN1 | ENSG00000176884 | 358 | NP_001172019.1 |
| GRIN2A | ENSG00000183454 | 359 | NP_001127879.1 |
| GRIN2B | ENSG00000273079 | 360 | NP_000825.2 |
| GRIP1 | ENSG00000155974 | 361 | NP_066973.2 |
| GRM1 | ENSG00000152822 | 362 | NP_000829.2 |
| GRM4 | ENSG00000124493 | 363 | NP_000832.1 |
| GRM5 | ENSG00000168959 | 364 | NP_001137303.1 |
| GRM7 | ENSG00000196277 | 365 | NP_870989.1 |
| GRM8 | ENSG00000179603 | 366 | NP_000836.2 |
| GRPR | ENSG00000126010 | 367 | NP_005305.1 |
| GSK3B | ENSG00000082701 | 368 | NP_002084.2 |
| GSN | ENSG00000148180 | 369 | NP_000168.1 |
| GSTM1 | ENSG00000134184 | 370 | NP_000552.2 |
| GTF2I | ENSG00000263001 | 371 | NP_127492.1 |
| GUCY1A2 | ENSG00000152402 | 372 | NP_001243353.1 |
| HCFC1 | ENSG00000172534 | 373 | NP_005325.2 |
| HCN1 | ENSG00000164588 | 374 | NP_066550.2 |
| HDAC3 | ENSG00000171720 | 375 | NP_003874.2 |
| HDAC4 | ENSG00000068024 | 376 | NP_006028.2 |
| HDAC6 | ENSG00000094631 | 377 | NP_006035.2 |
| HDC | ENSG00000140287 | 378 | NP_002103.2 |
| HECW2 | ENSG00000138411 | 379 | NP_065811.1 |
| HEPACAM | ENSG00000165478 | 380 | NP_689935.2 |
| HERC2 | ENSG00000276802, | 381 | NP_004658.3 |
| | ENSG00000128731, | 382 | |
| | ENSG00000277278 | 383 | |
| HIVEP3 | ENSG00000127124 | 384 | NP_078779.2 |
| HLA-A | ENSG00000235657, | 385 | NP_001229687.1 |
| | ENSG00000223980, | 386 | |
| | ENSG00000206503, | 387 | |
| | ENSG00000206505, | 388 | |
| | ENSG00000227715, | 389 | |
| | ENSG00000231834, | 390 | |
| | ENSG00000224320, | 391 | |
| | ENSG00000229215 | 392 | |
| HLA-B | ENSG00000223532, | 393 | NP_005505.2 |
| | ENSG00000206450, | 394 | |
| | ENSG00000234745, | 395 | |
| | ENSG00000224608, | 396 | |
| | ENSG00000228964, | 397 | |
| | ENSG00000232126 | 398 | |
| HLA-DRB1 | ENSG00000236884, | 399 | NP_001230894.1 |
| | ENSG00000228080, | 400 | |
| | ENSG00000206240, | 401 | |
| | ENSG00000229074, | 402 | |
| | ENSG00000206306, | 403 | |
| | ENSG00000196126 | 404 | |
| HMGN1 | ENSG00000205581 | 405 | NP_004956.5 |
| HNRNPH2 | ENSG00000126945 | 406 | NP_001027565.1 |
| HOMER1 | ENSG00000152413 | 407 | NP_004263.1 |
| HOXA1 | ENSG00000105991 | 408 | NP_005513.1 |
| HOXB1 | ENSG00000120094 | 409 | NP_002135.2 |
| HRAS | ENSG00000174775, | 410 | NP_001123914.1 |
| | ENSG00000276536 | 411 | |
| HS3ST5 | ENSG00000249853 | 412 | NP_705840.2 |
| HSD11B1 | ENSG00000117594 | 413 | NP_861420.1 |
| HTR1B | ENSG00000135312 | 414 | NP_000854.1 |
| HTR2A | ENSG00000102468 | 415 | NP_000612.1 |
| HTR3A | ENSG00000166736 | 416 | NP_998786.2 |
| HTR3C | ENSG00000178084 | 417 | NP_570126.2 |
| HTR7 | ENSG00000148680 | 418 | NP_062873.1 |
| HUWE1 | ENSG00000086758 | 419 | NP_113584.3 |
| HYDIN | ENSG00000157423, | 420 | NP_001257903.1 |
| | ENSG00000283022 | 421 | |
| ICA1 | ENSG00000003147 | 422 | NP_071682.1 |
| IFNG | ENSG00000111537 | 423 | NP_000610.2 |
| IFNGR1 | ENSG00000027697 | 424 | NP_000407.1 |
| IL16 | ENSG00000172349 | 425 | NP_757366.2 |
| IL17A | ENSG00000112115 | 426 | NP_002181.1 |
| IL1R2 | ENSG00000115590 | 427 | NP_004624.1 |
| IL1RAPL1 | ENSG00000169306 | 428 | NP_055086.1 |
| IL1RAPL2 | ENSG00000189108 | 429 | NP_059112.1 |
| IL6 | ENSG00000136244 | 430 | NP_000591.1 |
| ILF2 | ENSG00000143621 | 431 | NP_004506.2 |
| IMMP2L | ENSG00000184903 | 432 | NP_115938.1 |
| INADL | ENSG00000132849 | 433 | NP_795352.2 |
| INPP1 | ENSG00000151689 | 434 | NP_001122400.1 |
| INTS6 | ENSG00000102786 | 435 | NP_036273.1 |
| IQGAP3 | ENSG00000183856 | 436 | NP_839943.2 |
| IQSEC2 | ENSG00000124313 | 437 | NP_001104595.1 |
| IRF2BPL | ENSG00000119669 | 438 | NP_078772.1 |
| ITGA4 | ENSG00000115232 | 439 | NP_000876.3 |
| ITGB3 | ENSG00000259207 | 440 | NP_000203.2 |
| ITGB7 | ENSG00000139626 | 441 | NP_000880.1 |
| ITPR1 | ENSG00000150995 | 442 | NP_001161744.1 |
| JAKMIP1 | ENSG00000152969 | 443 | NP_001092903.1 |
| JARID2 | ENSG00000008083 | 444 | NP_004964.2 |
| JMJD1C | ENSG00000171988 | 445 | NP_116165.1 |
| KANK1 | ENSG00000107104 | 446 | NP_001243805.1 |
| KAT2B | ENSG00000114166 | 447 | NP_003875.3 |
| KAT6A | ENSG00000083168 | 448 | NP_001092882.1 |
| KATNAL2 | ENSG00000167216 | 449 | NP_112593.2 |
| KCND2 | ENSG00000184408 | 450 | NP_036413.1 |
| KCNJ10 | ENSG00000177807 | 451 | NP_002232.2 |
| KCNJ12 | ENSG00000184185 | 452 | NP_066292.2 |
| KCNJ15 | ENSG00000157551 | 453 | NP_002234.2 |
| KCNJ2 | ENSG00000123700 | 454 | NP_000882.1 |
| KCNMA1 | ENSG00000156113 | 455 | NP_001154824.1 |
| KCNQ2 | ENSG00000281151, | 456 | NP_742105.1 |
| | ENSG00000075043 | 457 | |
| KCNQ3 | ENSG00000184156 | 458 | NP_004510.1 |
| KCNT1 | ENSG00000107147 | 459 | NP_065873.2 |
| KCTD13 | ENSG00000174943 | 460 | NP_849194.1 |
| KDM4B | ENSG00000127663 | 461 | NP_055830.1 |
| KDM5B | ENSG00000117139 | 462 | NP_006609.3 |
| KDM5C | ENSG00000126012 | 463 | NP_004178.2 |
| KDM6B | ENSG00000132510 | 464 | NP_001073893.1 |
| KHDRBS2 | ENSG00000112232 | 465 | NP_689901.2 |
| KHDRBS3 | ENSG00000131773 | 466 | NP_006549.1 |
| KIAA1586 | ENSG00000168116 | 467 | NP_065982.1 |
| KIAA2022 | ENSG00000050030 | 468 | NP_001008537.1 |
| KIF13B | ENSG00000197892 | 469 | NP_056069.2 |
| KIF5C | ENSG00000276734, | 470 | NP_004513.1 |
| | ENSG00000168280 | 471 | |
| KIRREL3 | ENSG00000149571 | 472 | NP_115920.1 |
| KIT | ENSG00000157404 | 473 | NP_000213.1 |
| KLC2 | ENSG00000174996 | 474 | NP_073733.1 |
| KMO | ENSG00000117009 | 475 | NP_003670.2 |
| KMT2A | ENSG00000118058 | 476 | NP_005924.2 |
| KMT2C | ENSG00000055609 | 477 | NP_733751.2 |
| KMT2E | ENSG00000005483 | 478 | NP_891847.1 |
| KMT5B | ENSG00000110066 | 479 | NP_060105.3 |
| KPTN | ENSG00000118162 | 480 | NP_008990.2 |
| KRR1 | ENSG00000111615 | 481 | NP_008974.5 |
| LAMA1 | ENSG00000101680 | 482 | NP_005550.2 |
| LAMB1 | ENSG00000091136 | 483 | NP_002282.2 |
| LAMC3 | ENSG00000050555 | 484 | NP_006050.3 |
| LEP | ENSG00000174697 | 485 | NP_000221.1 |
| LIN7B | ENSG00000104863 | 486 | NP_071448.1 |
| LMX1B | ENSG00000136944 | 487 | NP_001167617.1 |
| LPL | ENSG00000175445 | 488 | NP_000228.1 |
| LRBA | ENSG00000198589 | 489 | NP_006717.2 |
| LRFN5 | ENSG00000165379 | 490 | NP_689660.2 |
| LRP2 | ENSG00000081479 | 491 | NP_004516.2 |
| LRP2BP | ENSG00000109771 | 492 | NP_060879.2 |
| LRPPRC | ENSG00000138095 | 493 | NP_573566.2 |
| LRRC1 | ENSG00000137269 | 494 | NP_060684.4 |
| LRRC7 | ENSG00000033122 | 495 | NP_065845.1 |
| LZTR1 | ENSG00000099949 | 496 | NP_006758.2 |
| LZTS2 | ENSG00000107816 | 497 | NP_115805.1 |
| MACROD2 | ENSG00000172264 | 498 | NP_542407.2 |
| MAGED1 | ENSG00000179222 | 499 | NP_001005333.1 |
| MAGEL2 | ENSG00000254585 | 500 | NP_061939.3 |
| MAL | ENSG00000172005 | 501 | NP_002362.1 |
| MAOA | ENSG00000189221 | 502 | NP_000231.1 |
| MAOB | ENSG00000069535 | 503 | NP_000889.3 |
| MAP2 | ENSG00000078018 | 504 | NP_002365.3 |
| MAPK1 | ENSG00000100030 | 505 | NP_620407.1 |
| MAPK12 | ENSG00000188130 | 506 | NP_002960.2 |
| MAPK3 | ENSG00000102882 | 507 | NP_002737.2 |
| MAPK8IP2 | ENSG00000008735 | 508 | NP_036456.1 |
| MARK1 | ENSG00000116141 | 509 | NP_061120.3 |
| MBD1 | ENSG00000141644 | 510 | NP_001191065.1 |
| MBD3 | ENSG00000071655 | 511 | NP_003917.1 |
| MBD4 | ENSG00000129071 | 512 | NP_003916.1 |
| MBD5 | ENSG00000204406 | 513 | NP_060798.2 |
| MBD6 | ENSG00000166987 | 514 | NP_443129.3 |
| MBOAT7 | ENSG00000275118, | 515 | NP_077274.3 |
| | ENSG00000273592, | 516 | |
| | ENSG00000125505, | 517 | |
| | ENSG00000276935, | 518 | |
| | ENSG00000278519, | 519 | |
| | ENSG00000277733, | 520 | |
| | ENSG00000278322, | 521 | |
| | ENSG00000274194, | 522 | |
| | ENSG00000277025, | 523 | |
| | ENSG00000277923 | 524 | |
| MC4R | ENSG00000166603 | 525 | NP_005903.2 |
| MCC | ENSG00000171444 | 526 | NP_001078846.1 |
| MCM4 | ENSG00000104738 | 527 | NP_877423.1 |
| MCPH1 | ENSG00000147316 | 528 | NP_078872.2 |
| MDGA2 | ENSG00000139915 | 529 | NP_001106970.2 |
| MECP2 | ENSG00000169057 | 530 | NP_001104262.1 |
| MED12 | ENSG00000184634 | 531 | NP_005111.2 |
| MED13L | ENSG00000123066 | 532 | NP_056150.1 |
| MEF2C | ENSG00000081189 | 533 | NP_001180276.1 |
| MET | ENSG00000105976 | 534 | NP_001120972.1 |
| MFRP | ENSG00000235718 | 535 | NP_113621.1 |
| MIB1 | ENSG00000101752 | 536 | NP_065825.1 |
| MKL2 | ENSG00000186260 | 537 | NP_054767.3 |
| MNT | ENSG00000070444 | 538 | NP_064706.1 |
| MOCOS | ENSG00000075643 | 539 | NP_060417.2 |
| MPP6 | ENSG00000105926 | 540 | NP_057531.2 |
| MSN | ENSG00000147065 | 541 | NP_002435.1 |
| MSNP1AS | ENSG00000251593 | 542 | |
| MSR1 | ENSG00000038945 | 543 | NP_619729.1 |
| MTF1 | ENSG00000188786 | 544 | NP_005946.2 |
| MTHFR | ENSG00000177000 | 545 | NP_005948.3 |
| MTOR | ENSG00000198793 | 546 | NP_004949.1 |
| MTR | ENSG00000116984 | 547 | NP_000245.2 |
| MTX2 | ENSG00000128654 | 548 | NP_006545.1 |
| MYH4 | ENSG00000264424 | 549 | NP_060003.2 |
| MYO16 | ENSG00000041515, | 550 | NP_001185879.1 |
| | ENSG00000282848 | 551 | |
| MYO1A | ENSG00000166866 | 552 | NP_001242970.1 |
| MYO9B | ENSG00000099331 | 553 | NP_004136.2 |
| MYOZ1 | ENSG00000177791 | 554 | NP_067068.1 |
| MYT1L | ENSG00000186487 | 555 | NP_055840.2 |
| NAA15 | ENSG00000164134 | 556 | NP_476516.1 |
| NAALADL2 | ENSG00000177694 | 557 | NP_996898.2 |
| NACC1 | ENSG00000160877 | 558 | NP_443108.1 |
| NAV2 | ENSG00000166833 | 559 | NP_001231892.1 |
| NBEA | ENSG00000172915 | 560 | NP_056493.3 |
| NCKAP1 | ENSG00000061676 | 561 | NP_995314.1 |
| NCKAP5 | ENSG00000176771 | 562 | NP_997246.2 |
| NCKAP5L | ENSG00000167566 | 563 | NP_001032895.2 |
| NCOR1 | ENSG00000141027 | 564 | NP_006302.2 |
| NDNL2 | ENSG00000185115, | 565 | NP_619649.1 |
| | ENSG00000282130 | 566 | |
| NDUFA5 | ENSG00000128609 | 567 | NP_004991.1 |
| NEFL | ENSG00000277586 | 568 | NP_006149.2 |
| NELL1 | ENSG00000165973 | 569 | NP_006148.2 |
| NEO1 | ENSG00000067141 | 570 | NP_002490.2 |
| NF1 | ENSG00000196712 | 571 | NP_001035957.1 |
| NFIA | ENSG00000162599 | 572 | NP_001138984.1 |
| NFIX | ENSG00000008441 | 573 | NP_001257972.1 |
| NINL | ENSG00000101004 | 574 | NP_079452.3 |
| NIPA1 | ENSG00000170113 | 575 | NP_653200.2 |
| NIPA2 | ENSG00000140157 | 576 | NP_001171818.1 |
| NIPBL | ENSG00000164190 | 577 | NP_597677.2 |
| NLGN1 | ENSG00000169760 | 578 | NP_055747.1 |
| NLGN2 | ENSG00000169992, | 579 | NP_065846.1 |
| | ENSG00000283859 | 580 | |
| NLGN3 | ENSG00000196338 | 581 | NP_851820.1 |
| NLGN4X | ENSG00000146938 | 582 | NP_065793.1 |
| NLGN4Y | ENSG00000165246 | 583 | NP_055708.3 |
| NOS1 | ENSG00000089250 | 584 | NP_001191147.1 |
| NOS1AP | ENSG00000198929 | 585 | NP_055512.1 |
| NOS2A | ENSG00000007171 | 586 | NP_000616.3 |
| NPAS2 | ENSG00000170485 | 587 | NP_002509.2 |
| NR2F1 | ENSG00000175745 | 588 | NP_005645.1 |
| NR3C2 | ENSG00000151623 | 589 | NP_000892.2 |
| NRCAM | ENSG00000091129 | 590 | NP_001032209.1 |
| NRG1 | ENSG00000157168 | 591 | NP_039250.2 |
| NRP2 | ENSG00000118257 | 592 | NP_957718.1 |
| NRXN1 | ENSG00000179915 | 593 | NP_001129131.1 |
| NRXN2 | ENSG00000110076 | 594 | NP_055895.1 |
| NRXN3 | ENSG00000021645 | 595 | NP_004787.2 |
| NSD1 | ENSG00000165671 | 596 | NP_071900.2 |
| NTNG1 | ENSG00000162631 | 597 | NP_001106697.1 |
| NTRK1 | ENSG00000198400 | 598 | NP_002520.2 |
| NTRK3 | ENSG00000140538 | 599 | NP_001012338.1 |
| NUAK1 | ENSG00000074590 | 600 | NP_055655.1 |
| NUP133 | ENSG00000069248 | 601 | NP_060700.2 |
| NXF5 | ENSG00000126952 | 602 | NP_116564.2 |
| NXPH1 | ENSG00000122584 | 603 | NP_689958.1 |
| OCRL | ENSG00000122126 | 604 | NP_000267.2 |
| ODF3L2 | ENSG00000181781 | 605 | NP_872383.1 |
| OGT | ENSG00000147162 | 606 | NP_858058.1 |
| OPHN1 | ENSG00000079482 | 607 | NP_002538.1 |
| OPRM1 | ENSG00000112038 | 608 | NP_001138751.1 |
| OR1C1 | ENSG00000221888 | 609 | NP_036485.2 |
| OR2M4 | ENSG00000171180 | 610 | NP_059974.1 |
| OR2T10 | ENSG00000184022 | 611 | NP_001004693.1 |
| OR52M1 | ENSG00000197790 | 612 | NP_001004137.1 |
| OTX1 | ENSG00000115507 | 613 | NP_055377.1 |
| OXT | ENSG00000101405 | 614 | NP_000906.1 |
| OXTR | ENSG00000180914 | 615 | NP_000907.2 |
| P2RX4 | ENSG00000135124 | 616 | NP_001243725.1 |
| P2RX5 | ENSG00000083454 | 617 | NP_002552.2 |
| P4HA2 | ENSG00000072682 | 618 | NP_001136071.1 |
| PACS1 | ENSG00000175115 | 619 | NP_060496.2 |
| PAFAH1B1 | ENSG00000007168 | 620 | NP_000421.1 |
| PAH | ENSG00000171759 | 621 | NP_000268.1 |
| PARD3B | ENSG00000116117 | 622 | NP_689739.4 |
| PARK2 | ENSG00000185345 | 623 | NP_004553.2 |
| PAX5 | ENSG00000196092 | 624 | NP_057953.1 |
| PAX6 | ENSG00000007372 | 625 | NP_001245391.1 |
| PCCA | ENSG00000175198 | 626 | NP_000273.2 |
| PCCB | ENSG00000114054 | 627 | NP_001171485.1 |
| PCDH10 | ENSG00000138650 | 628 | NP_116586.1 |
| PCDH15 | ENSG00000150275 | 629 | NP_001136235.1 |
| PCDH19 | ENSG00000165194 | 630 | NP_001171809.1 |
| PCDH8 | ENSG00000136099 | 631 | NP_002581.2 |
| PCDH9 | ENSG00000184226 | 632 | NP_982354.1 |
| PCDHA1 | ENSG00000204970 | 633 | NP_061723.1 |
| PCDHA10 | ENSG00000250120 | 634 | NP_061724.1 |
| PCDHA11 | ENSG00000249158 | 635 | NP_061725.1 |
| PCDHA12 | ENSG00000251664 | 636 | NP_061726.1 |
| PCDHA13 | ENSG00000239389 | 637 | NP_061727.1 |
| PCDHA2 | ENSG00000204969 | 638 | NP_061728.1 |
| PCDHA3 | ENSG00000255408 | 639 | NP_061729.1 |
| PCDHA4 | ENSG00000204967 | 640 | NP_061730.1 |
| PCDHA5 | ENSG00000204965 | 641 | NP_061731.1 |
| PCDHA6 | ENSG00000081842 | 642 | NP_061732.1 |
| PCDHA7 | ENSG00000204963 | 643 | NP_061733.1 |
| PCDHA8 | ENSG00000204962 | 644 | NP_061734.1 |
| PCDHA9 | ENSG00000204961 | 645 | NP_114063.1 |
| PCDHAC1 | ENSG00000248383 | 646 | NP_061721.2 |
| PCDHAC2 | ENSG00000243232 | 647 | NP_061722.1 |
| PCDHGA11 | ENSG00000253873 | 648 | NP_061737.1 |
| PDE1C | ENSG00000154678 | 649 | NP_001177987.1 |
| PDE4A | ENSG00000065989 | 650 | NP_001104777.1 |
| PDE4B | ENSG00000184588 | 651 | NP_002591.2 |
| PDZD4 | ENSG00000067840 | 652 | NP_115901.2 |
| PECR | ENSG00000115425 | 653 | NP_060911.2 |
| PERI | ENSG00000179094 | 654 | NP_002607.2 |
| PEX7 | ENSG00000112357 | 655 | NP_000279.1 |
| PGLYRP2 | ENSG00000161031 | 656 | NP_443122.3 |
| PHF2 | ENSG00000197724 | 657 | NP_005383.3 |
| PHF8 | ENSG00000172943 | 658 | NP_001171825.1 |
| PHIP | ENSG00000146247 | 659 | NP_060404.4 |
| PHRF1 | ENSG00000070047, | 660 | NP_065952.2 |
| | ENSG00000274780 | 661 | |
| PIK3CG | ENSG00000105851 | 662 | NP_002640.2 |
| PIK3R2 | ENSG00000105647 | 663 | NP_005018.1 |
| PINX1 | ENSG00000254093 | 664 | NP_060354.4 |
| PITX1 | ENSG00000069011 | 665 | NP_002644.4 |
| PLAUR | ENS G00000011422 | 666 | NP_002650.1 |
| PLCB1 | ENSG00000182621 | 667 | NP_056007.1 |
| PLCD1 | ENSG00000187091 | 668 | NP_001124436.1 |
| PLN | ENSG00000198523 | 669 | NP_002658.1 |
| PLXNA4 | ENSG00000221866 | 670 | NP_065962.1 |
| PLXNB1 | ENSG00000164050 | 671 | NP_001123554.1 |
| POGZ | ENSG00000143442 | 672 | NP_055915.2 |
| POMGNT1 | ENSG00000085998 | 673 | NP_001230695.1 |
| PON1 | ENSG00000005421 | 674 | NP_000437.3 |
| POT1 | ENSG00000128513 | 675 | NP_056265.2 |
| POU3F2 | ENSG00000184486 | 676 | NP_005595.2 |
| PPFIA1 | ENSG00000131626 | 677 | NP_003617.1 |
| PPP1R1B | ENSG00000131771 | 678 | NP_115568.2 |
| PPP1R3F | ENSG00000049769 | 679 | NP_149992.3 |
| PPP2R1B | ENSG00000137713 | 680 | NP_859050.1 |
| PPP2R5D | ENSG00000112640 | 681 | NP_006236.1 |
| PREX1 | ENSG00000124126 | 682 | NP_065871.2 |
| PRICKLE1 | ENSG00000139174 | 683 | NP_694571.2 |
| PRICKLE2 | ENSG00000163637 | 684 | NP_942559.1 |
| PRKCB | ENSG00000166501 | 685 | NP_002729.2 |
| PRKD1 | ENSG00000184304 | 686 | NP_002733.2 |
| PRKDC | ENSG00000253729 | 687 | NP_008835.5 |
| PRODH | ENSG00000100033 | 688 | NP_057419.4 |
| PRSS38 | ENSG00000185888 | 689 | NP_898885.1 |
| PRUNE2 | ENSG00000106772 | 690 | NP_056040.2 |
| PSD3 | ENSG00000156011 | 691 | NP_056125.3 |
| PSMD10 | ENSG00000101843 | 692 | NP_002805.1 |
| PSMD12 | ENSG00000197170 | 693 | NP_002807.1 |
| PTBP2 | ENSG00000117569 | 694 | NP_067013.1 |
| PTCHD1 | ENSG00000165186 | 695 | NP_775766.2 |
| PTEN | ENSG00000171862 | 696 | NP_000305.3 |
| PTGER3 | ENSG00000050628 | 697 | NP_942011.1 |
| PTGS2 | ENSG00000073756 | 698 | NP_000954.1 |
| PTK7 | ENSG00000112655 | 699 | NP_001257327.1 |
| PTPN11 | ENSG00000179295 | 700 | NP_002825.3 |
| PTPRB | ENSG00000127329 | 701 | NP_001103224.1 |
| PTPRC | ENSG00000262418, | 702 | NP_002829.3 |
| | ENSG00000081237 | 703 | |
| PTPRT | ENSG00000196090 | 704 | NP_573400.3 |
| PVALB | ENSG00000100362, | 705 | NP_002845.1 |
| | ENSG00000274665 | 706 | |
| PXDN | ENSG00000130508 | 707 | NP_036425.1 |
| PYHIN1 | ENSG00000163564 | 708 | NP_689714.2 |
| RAB11FIP5 | ENSG00000135631 | 709 | NP_056285.1 |
| RAB19 | ENSG00000146955 | 710 | NP_001008749.2 |
| RAB2A | ENSG00000104388 | 711 | NP_002856.1 |
| RAB39B | ENSG00000155961 | 712 | NP_741995.1 |
| RAB43 | ENSG00000172780 | 713 | NP_001191812.1 |
| RAI1 | ENSG00000108557 | 714 | NP_109590.3 |
| RANBP17 | ENSG00000204764 | 715 | NP_075048.1 |
| RAPGEF4 | ENSG00000091428 | 716 | NP_008954.2 |
| RASD1 | ENSG00000108551 | 717 | NP_057168.1 |
| RASSF5 | ENSG00000266094 | 718 | NP_872604.1 |
| RB1CC1 | ENSG00000023287 | 719 | NP_055596.3 |
| RBFOX1/ | ENSG00000078328 | 720 | NP_665898.1 |
| A2BP1 | | | |
| RBM27 | ENSG00000091009 | 721 | NP_061862.1 |
| RBM8A | ENSG00000265241 | 722 | NP_005096.1 |
| RBMS3 | ENSG00000144642 | 723 | NP_001003793.1 |
| REEP3 | ENSG00000165476 | 724 | NP_001001330.1 |
| RELN | ENSG00000189056 | 725 | NP_005036.2 |
| RERE | ENSG00000142599 | 726 | NP_036234.3 |
| RFWD2 | ENSG00000143207 | 727 | NP_071902.2 |
| RGS7 | ENSG00000182901 | 728 | NP_002915.3 |
| RHOXF1 | ENSG00000101883 | 729 | NP_644811.1 |
| RIMS1 | ENSG00000079841 | 730 | NP_055804.2 |
| RIMS3 | ENSG00000117016 | 731 | NP_055562.2 |
| RIT2 | ENSG00000152214 | 732 | NP_002921.1 |
| RLIM | ENSG00000131263 | 733 | NP_057204.2 |
| RNF135 | ENSG00000181481 | 734 | NP_115698.3 |
| RNPS1 | ENSG00000205937 | 735 | NP_542161.1 |
| ROBO1 | ENSG00000169855 | 736 | NP_002932.1 |
| ROBO2 | ENSG00000185008 | 737 | NP_001122401.1 |
| RORA | ENSG00000069667 | 738 | NP_599022.1 |
| RPL10 | ENSG00000147403 | 739 | NP_001243506.2 |
| RPP25 | ENSG00000178718 | 740 | NP_060263.2 |
| RPS6KA2 | ENSG00000071242 | 741 | NP_001006933.1 |
| RPS6KA3 | ENSG00000177189 | 742 | NP_004577.1 |
| SAE1 | ENSG00000142230 | 743 | NP_005491.1 |
| SATB2 | ENSG00000119042 | 744 | NP_001165980.1 |
| SBF1 | ENSG00000100241 | 745 | NP_002963.2 |
| SCFD2 | ENSG00000184178 | 746 | NP_689753.2 |
| SCN1A | ENSG00000144285 | 747 | NP_001159435.1 |
| SCN2A | ENSG00000136531 | 748 | NP_066287.2 |
| SCN4A | ENSG00000007314 | 749 | NP_000325.4 |
| SCN5A | ENSG00000183873 | 750 | NP_001092874.1 |
| SCN7A | ENSG00000136546 | 751 | NP_002967.2 |
| SCN8A | ENSG00000196876 | 752 | NP_055006.1 |
| SCN9A | ENSG00000169432 | 753 | NP_002968.1 |
| SDC2 | ENSG00000169439 | 754 | NP_002989.2 |
| SDK1 | ENSG00000146555 | 755 | NP_689957.3 |
| SEMA5A | ENSG00000112902 | 756 | NP_003957.2 |
| SERPINE1 | ENSG00000106366 | 757 | NP_000593.1 |
| SETBP1 | ENSG00000152217 | 758 | NP_056374.2 |
| SETD2 | ENSG00000181555 | 759 | NP_054878.5 |
| SETD5 | ENSG00000168137 | 760 | NP_001073986.1 |
| SETDB1 | ENSG00000143379 | 761 | NP_001138887.1 |
| SETDB2 | ENSG00000136169 | 762 | NP_114121.2 |
| SEZ6L2 | ENSG00000174938 | 763 | NP_001230261.1 |
| SGSH | ENSG00000181523 | 764 | NP_000190.1 |
| SGSM3 | ENSG00000100359 | 765 | NP_056520.2 |
| SH3KBP1 | ENSG00000147010 | 766 | NP_114098.1 |
| SHANK1 | ENSG00000161681 | 767 | NP_057232.2 |
| SHANK2 | ENSG00000162105 | 768 | NP_036441.2 |
| SHANK3 | ENSG00000251322, | 769 | NP_277052.1 |
| | ENSG00000283243 | 770 | |
| SHOX | ENSG00000185960 | 771 | NP_000442.1 |
| SIK1 | ENSG00000142178 | 772 | NP_775490.2 |
| SIN3A | ENSG00000169375 | 773 | NP_001138829.1 |
| SLC12A5 | ENSG00000124140 | 774 | NP_001128243.1 |
| SLC16A3 | ENSG00000141526 | 775 | NP_001035888.1 |
| SLC16A7 | ENSG00000118596 | 776 | NP_004722.2 |
| SLC1A1 | ENSG00000106688 | 777 | NP_004161.4 |
| SLC1A2 | ENSG00000110436 | 778 | NP_004162.2 |
| SLC22A15 | ENSG00000163393 | 779 | NP_060890.2 |
| SLC22A9 | ENSG00000149742 | 780 | NP_543142.2 |
| SLC24A2 | ENSG00000155886 | 781 | NP_065077.1 |
| SLC25A12 | ENSG00000115840 | 782 | NP_003696.2 |
| SLC25A14 | ENSG00000102078 | 783 | NP_003942.1 |
| SLC25A24 | ENSG00000085491, | 784 | NP_037518.3 |
| | ENSG00000284468 | 785 | |
| SLC25A27 | ENSG00000153291 | 786 | NP_004268.3 |
| SLC27A4 | ENSG00000167114 | 787 | NP_005085.2 |
| SLC29A4 | ENSG00000164638 | 788 | NP_694979.2 |
| SLC30A3 | ENSG00000115194 | 789 | NP_003450.2 |
| SLC30A5 | ENSG00000145740 | 790 | NP_075053.2 |
| SLC33A1 | ENSG00000169359 | 791 | NP_001177921.1 |
| SLC35A3 | ENSG00000117620 | 792 | NP_001258614.1 |
| SLC38A10 | ENSG00000157637 | 793 | NP_001033073.1 |
| SLC39A11 | ENSG00000282291, | 794 | NP_001153242.1 |
| | ENSG00000133195 | 795 | |
| SLC4A10 | ENSG00000144290 | 796 | NP_001171486.1 |
| SLC6A1 | ENSG00000157103 | 797 | NP_003033.3 |
| SLC6A3 | ENSG00000276996, | 798 | NP_001035.1 |
| | ENSG00000142319 | 799 | |
| SLC6A4 | ENSG00000108576 | 800 | NP_001036.1 |
| SLC6A8 | ENSG00000130821 | 801 | NP_005620.1 |
| SLC7A3 | ENSG00000165349 | 802 | NP_116192.4 |
| SLC7A5 | ENSG00000103257 | 803 | NP_003477.4 |
| SLC9A6 | ENSG00000198689 | 804 | NP_001036002.1 |
| SLC9A9 | ENSG00000181804 | 805 | NP_775924.1 |
| SLCO1B3 | ENSG00000111700 | 806 | NP_062818.1 |
| SLIT3 | ENSG00000184347 | 807 | NP_003053.1 |
| SLITRK5 | ENSG00000165300 | 808 | NP_056382.1 |
| SMARCA2 | ENSG00000080503 | 809 | NP_003061.3 |
| SMARCC2 | ENSG00000139613 | 810 | NP_003066.2 |
| SMC3 | ENSG00000108055 | 811 | NP_005436.1 |
| SMG6 | ENSG00000070366 | 812 | NP_060045.4 |
| SNAP25 | ENSG00000132639 | 813 | NP_003072.2 |
| SND1 | ENSG00000197157 | 814 | NP_055205.2 |
| SNRPN | ENSG00000128739 | 815 | NP_073716.1 |
| SNTG2 | ENSG00000172554, | 816 | NP_061841.2 |
| | ENSG00000281486, | 817 | |
| | ENSG00000281020 | 818 | |
| SNX14 | ENSG00000135317 | 819 | NP_722523.1 |
| SNX19 | ENSG00000120451 | 820 | NP_055573.2 |
| SOD1 | ENSG00000142168 | 821 | NP_000445.1 |
| SOX5 | ENSG00000134532 | 822 | NP_008871.3 |
| SPARCL1 | ENSG00000152583 | 823 | NP_001121782.1 |
| SPAST | ENSG00000021574 | 824 | NP_055761.2 |
| SRCAP | ENSG00000080603 | 825 | NP_006653.2 |
| SRD5A2 | ENSG00000277893 | 826 | NP_000339.2 |
| SRGAP3 | ENSG00000196220 | 827 | NP_055665.1 |
| SRRM4 | ENSG00000139767 | 828 | NP_919262.2 |
| SSPO | ENSG00000197558 | 829 | NP_940857.2 |
| ST7 | ENSG00000004866 | 830 | NP_068708.1 |
| ST8SIA2 | ENSG00000140557 | 831 | NP_006002.1 |
| STAG1 | ENSG00000118007 | 832 | NP_005853.2 |
| STAT1 | ENSG00000115415 | 833 | NP_009330.1 |
| STK39 | ENSG00000198648 | 834 | NP_037365.2 |
| STX1A | ENSG00000106089 | 835 | NP_004594.1 |
| STXBP1 | ENSG00000136854 | 836 | NP_003156.1 |
| STXBP5 | ENSG00000164506 | 837 | NP_001121187.1 |
| STYK1 | ENSG00000060140 | 838 | NP_060893.2 |
| SUCLG2 | ENSG00000172340 | 839 | NP_001171070.1 |
| SYAP1 | ENSG00000169895 | 840 | NP_116185.2 |
| SYN1 | ENSG00000008056 | 841 | NP_008881.2 |
| SYN2 | ENSG00000157152 | 842 | NP_598328.1 |
| SYN3 | ENSG00000185666 | 843 | NP_003481.3 |
| SYNE1 | ENSG00000131018 | 844 | NP_892006.3 |
| SYNGAP1 | ENSG00000197283, | 845 | NP_006763.2 |
| | ENSG00000227460 | 846 | |
| SYT17 | ENSG00000103528 | 847 | NP_057608.2 |
| SYT3 | ENSG00000213023 | 848 | NP_115674.1 |
| TAF1 | ENSG00000147133 | 849 | NP_004597.2 |
| TAF1C | ENSG00000103168 | 850 | NP_005670.3 |
| TAF1L | ENSG00000122728 | 851 | NP_722516.1 |
| TANC2 | ENSG00000170921 | 852 | NP_079461.2 |
| TBC1D31 | ENSG00000156787 | 853 | NP_663622.2 |
| TBC1D5 | ENSG00000131374 | 854 | NP_001127853.1 |
| TBC1D7 | ENSG00000145979 | 855 | NP_001137436.1 |
| TBL1X | ENSG00000101849 | 856 | NP_001132938.1 |
| TBL1XR1 | ENSG00000177565 | 857 | NP_078941.2 |
| TBR1 | ENSG00000136535 | 858 | NP_006584.1 |
| TBX1 | ENSG00000184058 | 859 | NP_542378.1 |
| TCF20 | ENSG00000276461, | 860 | NP_005641.1 |
| | ENSG00000262024, | 861 | |
| | ENSG00000100207, | 862 | |
| | ENSG00000280467, | 863 | |
| | ENSG00000281897, | 864 | |
| | ENSG00000283026, | 865 | |
| | ENSG00000282892, | 866 | |
| | ENSG00000283681 | 867 | |
| TCF4 | ENSG00000196628 | 868 | NP_001230155.2 |
| TCF7L2 | ENSG00000148737 | 869 | NP_001139746.1 |
| TDO2 | ENSG00000151790, | 870 | NP_005642.1 |
| | ENSG00000262635 | 871 | |
| TERF2 | ENSG00000132604 | 872 | NP_005643.2 |
| TERT | ENSG00000164362 | 873 | NP_937983.2 |
| TET2 | ENSG00000168769 | 874 | NP_001120680.1 |
| TGM3 | ENSG00000125780 | 875 | NP_003236.3 |
| TH | ENSG00000180176 | 876 | NP_954986.2 |
| THAP8 | ENSG00000161277 | 877 | NP_689871.1 |
| THBS1 | ENSG00000137801 | 878 | NP_003237.2 |
| THRA | ENSG00000126351 | 879 | NP_003241.2 |
| TLK2 | ENSG00000146872 | 880 | NP_006843.2 |
| TM4SF20 | ENSG00000168955 | 881 | NP_079071.2 |
| TMEM231 | ENSG00000205084 | 882 | NP_001070884.1 |
| TMLHE | ENSG00000185973 | 883 | NP_060666.1 |
| TNIP2 | ENSG00000168884 | 884 | NP_077285.3 |
| TNN | ENSG00000120332 | 885 | NP_071376.1 |
| TNRC6B | ENSG00000100354 | 886 | NP_001155973.1 |
| TOMM20 | ENSG00000173726 | 887 | NP_055580.1 |
| TOP1 | ENSG00000198900 | 888 | NP_003277.1 |
| TOP3B | ENSG00000100038 | 889 | NP_003926.1 |
| TPH2 | ENSG00000139287 | 890 | NP_775489.2 |
| TPO | ENSG00000115705, | 891 | NP_000538.3 |
| | ENSG00000277603 | 892 | |
| TRIM33 | ENSG00000197323 | 893 | NP_056990.3 |
| TRIO | ENSG00000038382 | 894 | NP_009049.2 |
| TRIP12 | ENSG00000153827 | 895 | NP_004229.1 |
| TRPC6 | ENSG00000137672 | 896 | NP_004612.2 |
| TRPM1 | ENSG00000134160, | 897 | NP_001238949.1 |
| | ENSG00000274965 | 898 | |
| TSC1 | ENSG00000165699 | 899 | NP_000359.1 |
| TSC2 | ENSG00000103197 | 900 | NP_000539.2 |
| TSHZ3 | ENSG00000121297 | 901 | NP_065907.2 |
| TSN | ENSG00000211460 | 902 | NP_004613.1 |
| TSPAN7 | ENSG00000156298 | 903 | NP_004606.2 |
| TTI2 | ENSG00000129696 | 904 | NP_079391.2 |
| TTN | ENSG00000155657 | 905 | NP_001254479.1 |
| TUBGCP5 | ENSG00000280807, | 906 | NP_001096080.1 |
| | ENSG00000275835, | 907 | |
| | ENSG00000276856 | 908 | |
| TYR | ENSG00000077498 | 909 | NP_000363.1 |
| UBA6 | ENSG00000033178 | 910 | NP_060697.4 |
| UBE2H | ENSG00000186591 | 911 | NP_003335.1 |
| UBE3A | ENSG00000114062 | 912 | NP_000453.2 |
| UBE3B | ENSG00000151148 | 913 | NP_904324.1 |
| UBE3C | ENSG00000009335 | 914 | NP_055486.2 |
| UBL7 | ENSG00000138629 | 915 | NP_116296.1 |
| UBR5 | ENSG00000104517 | 916 | NP_056986.2 |
| UBR7 | ENSG00000278787, | 917 | NP_786924.2 |
| | ENSG00000012963 | 918 | |
| UCN3 | ENSG00000178473 | 919 | NP_444277.2 |
| UNC13A | ENSG00000130477 | 920 | NP_001073890.2 |
| UNC80 | ENSG00000144406 | 921 | NP_115893.1 |
| UPB1 | ENSG00000100024 | 922 | NP_057411.1 |
| UPF2 | ENSG00000151461 | 923 | NP_056357.1 |
| UPF3B | ENSG00000125351 | 924 | NP_542199.1 |
| USP45 | ENSG00000123552 | 925 | NP_001073950.1 |
| USP7 | ENSG00000187555 | 926 | NP_003461.2 |
| USP9Y | ENSG00000114374 | 927 | NP_004645.2 |
| UTRN | ENSG00000152818 | 928 | NP_009055.2 |
| VASH1 | ENSG00000071246 | 929 | NP_055724.1 |
| VIL1 | ENSG00000127831 | 930 | NP_009058.2 |
| VIP | ENSG00000146469 | 931 | NP_003372.1 |
| VLDLR | ENSG00000147852 | 932 | NP_003374.3 |
| VPS13B | ENSG00000132549 | 933 | NP_060360.3 |
| VSIG4 | ENSG00000155659 | 934 | NP_009199.1 |
| WAC | ENSG00000095787 | 935 | NP_057712.2 |
| WDFY3 | ENSG00000163625 | 936 | NP_055806.2 |
| WDR93 | ENSG00000140527 | 937 | NP_064597.1 |
| WNK3 | ENSG00000196632 | 938 | NP_065973.2 |
| WNT1 | ENSG00000125084 | 939 | NP_005421.1 |
| WNT2 | ENSG00000105989 | 940 | NP_003382.1 |
| WWOX | ENSG00000186153 | 941 | NP_057457.1 |
| XIRP1 | ENSG00000168334 | 942 | NP_919269.2 |
| XPC | ENSG00000154767 | 943 | NP_004619.3 |
| XPO1 | ENSG00000082898 | 944 | NP_003391.1 |
| YEATS2 | ENSG00000163872 | 945 | NP_060493.3 |
| YTHDC2 | ENSG00000047188 | 946 | NP_073739.3 |
| YWHAE | ENSG00000108953, | 947 | NP_006752.1 |
| | ENSG00000274474 | 948 | |
| ZBTB16 | ENSG00000109906 | 949 | NP_005997.2 |
| ZBTB20 | ENSG00000181722 | 950 | NP_001157814.1 |
| ZC3H4 | ENSG00000130749 | 951 | NP_055983.1 |
| ZMYND11 | ENSG00000015171 | 952 | NP_006615.2 |
| ZNF18 | ENSG00000154957 | 953 | NP_653281.2 |
| ZNF292 | ENSG00000188994 | 954 | NP_055836.1 |
| ZNF385B | ENSG00000144331 | 955 | NP_689733.3 |
| ZNF407 | ENSG00000215421 | 956 | NP_060227.2 |
| ZNF462 | ENSG00000148143 | 957 | NP_067047.4 |
| ZNF517 | ENSG00000197363 | 958 | NP_998770.2 |
| ZNF559 | ENSG00000188321 | 959 | NP_001189335.1 |
| ZNF713 | ENSG00000178665 | 960 | NP_872439.1 |
| ZNF774 | ENSG00000196391 | 961 | NP_001004309.2 |
| ZNF8 | ENSG00000278129 | 962 | NP_066575.2 |
| ZNF804A | ENSG00000170396 | 963 | NP_919226.1 |
| ZNF827 | ENSG00000151612 | 964 | NP_849157.2 |
| ZSWIM5 | ENSG00000162415 | 965 | NP_065934.1 |
| ZWILCH | ENSG00000174442 | 966 | NP_060445.3 |

*Representative protein in the family encoded by the gene.

TABLE 2
(338 Genes)
SFARI genes that have a high-scoring hnRNP L motif within
500 bp of one of the Castle splice sites.

| | | | | Genes with hnRNP |
|---|---|---|---|---|
| | | | | binding sites within |
| | | | | 200 base pairs of an |
| | | SEQ | Accession | RBFox1/A2BP1 |
| Human Gene | Ensembl Identifier | ID NO | Number* | binding site |
| A2BP1 | ENSG00000078328 | 967 | NP_665898.1 | X |
| ABAT | ENSG00000183044 | 1 | NP_001120920.1 | |
| ABCA10 | ENSG00000154263 | 2 | NP_525021.3 | |
| ABCA7 | ENSG00000064687 | 3 | NP_061985.2 | X |
| ACHE | ENSG00000087085 | 5 | NP_000656.1 | |
| ACTN4 | ENSG00000130402, | 6 | NP_004915.2 | |
| | ENSG00000282844 | 7 | | |
| ACY1 | ENSG00000243989 | 8 | NP_001185824.1 | |
| ADAMTS18 | ENSG00000140873 | 10 | NP_955387.1 | X |
| ADARB1 | ENSG00000197381 | 11 | NP_056648.1 | |
| ADK | ENSG00000156110 | 13 | NP_001114.2 | |
| ADNP | ENSG00000101126 | 14 | NP_056154.1 | X |
| ADSL | ENSG00000239900 | 18 | NP_000017.1 | X |
| AHI1 | ENSG00000135541 | 26 | NP_001128302.1 | X |
| AKAP9 | ENSG00000127914 | 27 | NP_005742.4 | |
| ALG6 | ENSG00000088035 | 30 | NP_037471.2 | |
| AMT | ENSG00000145020 | 33 | NP_000472.2 | |
| ANK2 | ENSG00000145362 | 34 | NP_001139.3 | |
| ANK3 | ENSG00000151150 | 35 | NP_066267.2 | X |
| ANKRD11 | ENSG00000167522 | 36 | NP_001243111.1 | |
| ANXA1 | ENSG00000135046 | 38 | NP_000691.1 | |
| AP1S2 | ENSG00000182287 | 39 | NP_003907.3 | |
| APC | ENSG00000134982 | 42 | NP_001120982.1 | |
| APP | ENSG00000142192 | 44 | NP_000475.1 | X |
| ARHGAP15 | ENSG00000075884 | 47 | NP_060930.3 | |
| ARHGEF9 | ENSG00000131089 | 51 | NP_056000.1 | |
| ARID1B | ENSG00000049618 | 52 | NP_065783.3 | |
| ARNT2 | ENSG00000172379 | 53 | NP_055677.3 | |
| ASMT | ENSG00000196433 | 56 | NP_004034.2 | X |
| ASTN2 | ENSG00000148219 | 58 | NP_054729.3 | |
| ATP10A | ENSG00000206190 | 61 | NP_077816.1 | |
| ATP2B2 | ENSG00000157087 | 63 | NP_001001331.1 | X |
| ATP8A1 | ENSG00000124406 | 64 | NP_006086.1 | |
| ATRNL1 | ENSG00000107518 | 65 | NP_997186.1 | X |
| ATRX | ENSG00000085224 | 66 | NP_000480.3 | X |
| AUTS2 | ENSG00000158321 | 68 | NP_056385.1 | |
| BAIAP2 | ENSG00000175866 | 72 | NP_059345.1 | X |
| BCAS1 | ENSG00000064787 | 74 | NP_003648.2 | X |
| BCKDK | ENSG00000103507 | 75 | NP_005872.2 | |
| BCL11A | ENSG00000119866 | 76 | NP_075044.2 | X |
| BIN1 | ENSG00000136717 | 79 | NP_647593.1 | X |
| BRCA2 | ENSG00000139618 | 82 | NP_000050.2 | |
| BTAF1 | ENSG00000095564 | 84 | NP_003963.1 | |
| CACNA1B | ENSG00000148408 | 97 | NP_000709.1 | |
| CACNA1C | ENSG00000151067 | 98 | NP_955630.3 | X |
| CACNA1D | ENSG00000157388 | 99 | NP_000711.1 | X |
| CACNA1E | ENSG00000198216 | 100 | NP_001192222.1 | |
| CACNA1F | ENSG00000102001 | 101 | NP_005174.2 | |
| CACNA1G | ENSG00000006283 | 102 | NP_061496.2 | |
| CACNA11 | ENSG00000100346 | 104 | NP_066919.2 | |
| CACNA2D3 | ENSG00000157445 | 105 | NP_060868.2 | |
| CACNB2 | ENSG00000165995 | 106 | NP_963890.2 | X |
| CADPS2 | ENSG00000081803 | 109 | NP_001161412.1 | X |
| CAMTAI | ENSG00000171735 | 113 | NP_056030.1 | X |
| CAPN12 | ENSG00000182472 | 114 | NP_653292.2 | |
| CASK | ENSG00000147044 | 117 | NP_003679.2 | X |
| CBS | ENSG00000160200 | 118 | NP_001171479.1 | |
| CCT4 | ENSG00000115484 | 123 | NP_006421.2 | |
| CD38 | ENSG00000004468 | 124 | NP_001766.2 | |
| CD44 | ENSG00000026508 | 125 | NP_000601.3 | X |
| CD99L2 | ENSG00000102181 | 126 | NP_001229543.1 | X |
| CDH11 | ENSG00000140937 | 129 | NP_001788.2 | |
| CEP290 | ENSG00000198707 | 138 | NP_079390.3 | |
| CHD2 | ENSG00000173575 | 141 | NP_001262.3 | X |
| CHD7 | ENSG00000171316 | 142 | NP_060250.2 | |
| CHKB | ENSG00000100288 | 144 | NP_001164100.1 | |
| CHRNA7 | ENSG00000175344 | 146 | NP_001177384.1 | |
| CIB2 | ENSG00000136425 | 149 | NP_006374.1 | |
| CLSTN3 | ENSG00000139182 | 152 | NP_055533.2 | |
| CLTCL1 | ENSG00000070371 | 153 | NP_009029.3 | |
| CMIP | ENSG00000153815 | 154 | NP_938204.2 | |
| CNKSR2 | ENSG00000149970 | 155 | NP_055742.2 | X |
| CNOT3 | ENSG00000277600, | 156 | NP_055331.1 | |
| | ENSG00000274616, | 157 | | |
| | ENSG00000277114, | 158 | | |
| | ENSG00000088038, | 159 | | |
| | ENSG00000273943, | 160 | | |
| | ENSG00000274941, | 161 | | |
| | ENSG00000274176, | 162 | | |
| | ENSG00000277615, | 163 | | |
| | ENSG00000276082, | 164 | | |
| | ENSG00000275979 | 165 | | |
| CNR1 | ENSG00000118432 | 166 | NP_001153698.1 | |
| CNTN5 | ENSG00000149972 | 170 | NP_001230199.1 | |
| CNTNAP3 | ENSG00000106714 | 174 | NP_387504.2 | X |
| CNTNAP5 | ENSG00000155052 | 176 | NP_570129.1 | |
| CRHR2 | ENSG00000106113 | 178 | NP_001189404.1 | |
| CSNK1D | ENSG00000141551 | 180 | NP_001884.2 | X |
| CYLC2 | ENSG00000155833 | 193 | NP_001331.1 | |
| DAB1 | ENSG00000173406 | 195 | NP_066566.3 | |
| DAPK1 | ENSG00000196730 | 197 | NP_004929.2 | X |
| DAPP1 | ENSG00000070190 | 198 | NP_055210.2 | X |
| DDC | ENSG00000132437 | 202 | NP_001076440.1 | X |
| DDX11 | ENSG00000013573 | 203 | NP_689651.1 | |
| DDX3X | ENSG00000215301 | 204 | NP_001347.3 | |
| DEAF1 | ENSG00000177030, | 206 | NP_066288.2 | |
| | ENSG00000282712 | 207 | | |
| DENR | ENSG00000139726 | 208 | NP_003668.2 | X |
| DGKZ | ENSG00000149091 | 211 | NP_001099010.1 | |
| DHCR7 | ENSG00000172893 | 212 | NP_001351.2 | |
| DLG1 | ENSG00000075711 | 217 | NP_004078.2 | |
| DLGAP2 | ENSG00000198010, | 220 | NP_004736.2 | |
| | ENSG00000282152, | 221 | | |
| | ENSG00000274161, | 222 | | |
| | ENSG00000282318 | 223 | | |
| DMD | ENSG00000198947 | 228 | NP_003997.1 | X |
| DMXL2 | ENSG00000104093 | 230 | NP_001167587.1 | X |
| DNM1L | ENSG00000087470 | 235 | NP_036192.2 | X |
| DNMT3A | ENSG00000119772 | 236 | NP_072046.2 | |
| DOCK4 | ENSG00000128512 | 239 | NP_055520.3 | |
| DOCK8 | ENSG00000107099 | 240 | NP_982272.2 | |
| DPP4 | ENSG00000197635 | 243 | NP_001926.2 | X |
| DRD2 | ENSG00000149295 | 248 | NP_000786.1 | |
| DSCAM | ENSG00000171587 | 250 | NP_001380.2 | |
| DUSP15 | ENSG00000149599 | 252 | NP_542178.2 | X |
| DUSP22 | ENSG00000112679 | 253 | NP_064570.1 | |
| DYRK1A | ENSG00000157540 | 258 | NP_001387.2 | X |
| EGR2 | ENSG00000122877 | 261 | NP_001129649.1 | X |
| EIF4E | ENSG00000151247 | 264 | NP_001124151.1 | |
| ELAVL2 | ENSG00000107105 | 266 | NP_004423.2 | |
| ELP4 | ENSG00000109911 | 268 | NP_061913.3 | X |
| EPHB2 | ENSG00000133216 | 275 | NP_004433.2 | X |
| ERG | ENSG00000157554 | 281 | NP_001129626.1 | |
| ESR1 | ENSG00000091831 | 283 | NP_001116212.1 | |
| ESR2 | ENSG00000140009 | 284 | NP_001428.1 | X |
| FBN1 | ENSG00000166147 | 301 | NP_000129.3 | X |
| FLT1 | ENSG00000102755 | 311 | NP_002010.2 | |
| FMRI | ENSG00000102081 | 312 | NP_002015.1 | |
| FOLH1 | ENSG00000086205 | 313 | NP_004467.1 | |
| FOXP1 | ENSG00000114861 | 315 | NP_001231739.1 | X |
| FOXP2 | ENSG00000128573 | 316 | NP_683696.2 | |
| FRK | ENSG00000111816 | 317 | NP_002022.1 | |
| GABRB3 | ENSG00000166206 | 324 | NP_068712.1 | |
| GALNT14 | ENSG00000158089 | 329 | NP_001240755.1 | |
| GAP43 | ENSG00000172020 | 331 | NP_001123536.1 | |
| GAS2 | ENSG00000148935 | 332 | NP_001137302.1 | |
| GDA | ENSG00000119125 | 334 | NP_001229434.1 | X |
| GNAS | ENSG00000087460 | 341 | NP_536350.2 | X |
| GNB1L | ENSG00000185838 | 342 | NP_443730.1 | X |
| GPD2 | ENSG00000115159 | 345 | NP_001076581.2 | X |
| GRID1 | ENSG00000182771 | 351 | NP_060021.1 | |
| GRIK2 | ENSG00000164418 | 354 | NP_068775.1 | |
| GRIN1 | ENSG00000176884 | 358 | NP_001172019.1 | X |
| GRM1 | ENSG00000152822 | 362 | NP_000829.2 | X |
| GRM4 | ENSG00000124493 | 363 | NP_000832.1 | |
| GRM5 | ENSG00000168959 | 364 | NP_001137303.1 | X |
| GRM7 | ENSG00000196277 | 365 | NP_870989.1 | X |
| GRM8 | ENSG00000179603 | 366 | NP_000836.2 | X |
| GSK3B | ENSG00000082701 | 368 | NP_002084.2 | |
| GSN | ENSG00000148180 | 369 | NP_000168.1 | |
| GSTM1 | ENSG00000134184 | 370 | NP_000552.2 | |
| GTF2I | ENSG00000263001 | 371 | NP_127492.1 | |
| GUCY1A2 | ENSG00000152402 | 372 | NP_001243353.1 | |
| HDAC3 | ENSG00000171720 | 375 | NP_003874.2 | X |
| HDAC4 | ENSG00000068024 | 376 | NP_006028.2 | |
| HDAC6 | ENSG00000094631 | 377 | NP_006035.2 | |
| HLA-DRB1 | ENSG00000236884, | 399 | NP_001230894.1 | X |
| | ENSG00000228080, | 400 | | |
| | ENSG00000206240, | 401 | | |
| | ENSG00000229074, | 402 | | |
| | ENSG00000206306, | 403 | | |
| | ENSG00000196126 | 404 | | |
| HMGN1 | ENSG00000205581 | 405 | NP_004956.5 | |
| HOXA1 | ENSG00000105991 | 408 | NP_005513.1 | |
| HRAS | ENSG00000174775, | 410 | NP_001123914.1 | |
| | ENSG00000276536 | 411 | | |
| HTR3A | ENSG00000166736 | 416 | NP_998786.2 | X |
| HTR7 | ENSG00000148680 | 418 | NP_062873.1 | |
| ICA1 | ENSG00000003147 | 422 | NP_071682.1 | |
| IL16 | ENSG00000172349 | 425 | NP_757366.2 | |
| IQSEC2 | ENSG00000124313 | 437 | NP_001104595.1 | X |
| ITGA4 | ENSG00000115232 | 439 | NP_000876.3 | |
| ITPR1 | ENSG00000150995 | 442 | NP_001161744.1 | X |
| JMJD1C | ENSG00000171988 | 445 | NP_116165.1 | X |
| KCNMA1 | ENSG00000156113 | 455 | NP_001154824.1 | |
| KCNQ2 | ENSG00000281151, | 456 | NP_742105.1 | X |
| | ENSG00000075043 | 457 | | |
| KCNT1 | ENSG00000107147 | 459 | NP_065873.2 | |
| KHDRBS3 | ENSG00000131773 | 466 | NP_006549.1 | X |
| KIF13B | ENSG00000197892 | 469 | NP_056069.2 | X |
| KIF5C | ENSG00000276734, | 470 | NP_004513.1 | |
| | ENSG00000168280 | 471 | | |
| KLC2 | ENSG00000174996 | 474 | NP_073733.1 | X |
| KMO | ENSG00000117009 | 475 | NP_003670.2 | X |
| LAMC3 | ENSG00000050555 | 484 | NP_006050.3 | |
| LEP | ENSG00000174697 | 485 | NP_000221.1 | |
| LIN7B | ENSG00000104863 | 486 | NP_071448.1 | |
| LPL | ENSG00000175445 | 488 | NP_000228.1 | X |
| LRBA | ENSG00000198589 | 489 | NP_006717.2 | X |
| LRFN5 | ENSG00000165379 | 490 | NP_689660.2 | |
| LRRC7 | ENSG00000033122 | 495 | NP_065845.1 | X |
| LZTR1 | ENSG00000099949 | 496 | NP_006758.2 | |
| MAGED1 | ENSG00000179222 | 499 | NP_001005333.1 | |
| MAL | ENSG00000172005 | 501 | NP_002362.1 | |
| MAP2 | ENSG00000078018 | 504 | NP_002365.3 | X |
| MAPK3 | ENSG00000102882 | 507 | NP_002737.2 | |
| MARK1 | ENSG00000116141 | 509 | NP_061120.3 | |
| MBD1 | ENSG00000141644 | 510 | NP_001191065.1 | X |
| MBD4 | ENSG00000129071 | 512 | NP_003916.1 | |
| MBD5 | ENSG00000204406 | 513 | NP_060798.2 | |
| MBD6 | ENSG00000166987 | 514 | NP_443129.3 | |
| MCC | ENSG00000171444 | 526 | NP_001078846.1 | X |
| MED12 | ENSG00000184634 | 531 | NP_005111.2 | |
| MEF2C | ENSG00000081189 | 533 | NP_001180276.1 | X |
| MET | ENSG00000105976 | 534 | NP_001120972.1 | |
| MNT | ENSG00000070444 | 538 | NP_064706.1 | |
| MPP6 | ENSG00000105926 | 540 | NP_057531.2 | |
| MSR1 | ENSG00000038945 | 543 | NP_619729.1 | |
| MTX2 | ENSG00000128654 | 548 | NP_006545.1 | |
| MYT1L | ENSG00000186487 | 555 | NP_055840.2 | X |
| NAV2 | ENSG00000166833 | 559 | NP_001231892.1 | X |
| NBEA | ENSG00000172915 | 560 | NP_056493.3 | X |
| NCOR1 | ENSG00000141027 | 564 | NP_006302.2 | X |
| NDUFA5 | ENSG00000128609 | 567 | NP_004991.1 | |
| NF1 | ENSG00000196712 | 571 | NP_001035957.1 | |
| NFIA | ENSG00000162599 | 572 | NP_001138984.1 | X |
| NFIX | ENSG00000008441 | 573 | NP_001257972.1 | X |
| NIPA2 | ENSG00000140157 | 576 | NP_001171818.1 | |
| NIPBL | ENSG00000164190 | 577 | NP_597677.2 | |
| NLGN3 | ENSG00000196338 | 581 | NP_851820.1 | |
| NLGN4X | ENSG00000146938 | 582 | NP_065793.1 | X |
| NLGN4Y | ENSG00000165246 | 583 | NP_055708.3 | X |
| NPAS2 | ENSG00000170485 | 587 | NP_002509.2 | |
| NRCAM | ENSG00000091129 | 590 | NP_001032209.1 | X |
| NRG1 | ENSG00000157168 | 591 | NP_039250.2 | X |
| NRXN1 | ENSG00000179915 | 593 | NP_001129131.1 | X |
| NRXN2 | ENSG00000110076 | 594 | NP_055895.1 | X |
| NRXN3 | ENSG00000021645 | 595 | NP_004787.2 | X |
| NSD1 | ENSG00000165671 | 596 | NP_071900.2 | |
| NTRK1 | ENSG00000198400 | 598 | NP_002520.2 | |
| NTRK3 | ENSG00000140538 | 599 | NP_001012338.1 | X |
| NXF5 | ENSG00000126952 | 602 | NP_116564.2 | X |
| OCRL | ENSG00000122126 | 604 | NP_000267.2 | X |
| OGT | ENSG00000147162 | 606 | NP_858058.1 | |
| P4HA2 | ENSG00000072682 | 618 | NP_001136071.1 | |
| PACS1 | ENSG00000175115 | 619 | NP_060496.2 | |
| PAH | ENSG00000171759 | 621 | NP_000268.1 | X |
| PAX5 | ENSG00000196092 | 624 | NP_057953.1 | |
| PAX6 | ENSG00000007372 | 625 | NP_001245391.1 | X |
| PCCA | ENSG00000175198 | 626 | NP_000273.2 | X |
| PCCB | ENSG00000114054 | 627 | NP_001171485.1 | |
| PCDH19 | ENSG00000165194 | 630 | NP_001171809.1 | |
| PCDH8 | ENSG00000136099 | 631 | NP_002581.2 | |
| PECR | ENSG00000115425 | 653 | NP_060911.2 | |
| PER1 | ENSG00000179094 | 654 | NP_002607.2 | X |
| PHF2 | ENSG00000197724 | 657 | NP_005383.3 | |
| PHF8 | ENSG00000172943 | 658 | NP_001171825.1 | |
| PHIP | ENSG00000146247 | 659 | NP_060404.4 | X |
| PIK3R2 | ENSG00000105647 | 663 | NP_005018.1 | |
| PINX1 | ENSG00000254093 | 664 | NP_060354.4 | |
| PLAUR | ENSG00000011422 | 666 | NP_002650.1 | X |
| PLCB1 | ENSG00000182621 | 667 | NP_056007.1 | |
| PLXNB1 | ENSG00000164050 | 671 | NP_001123554.1 | |
| POGZ | ENSG00000143442 | 672 | NP_055915.2 | |
| PPFIA1 | ENSG00000131626 | 677 | NP_003617.1 | X |
| PPP1R3F | ENSG00000049769 | 679 | NP_149992.3 | |
| PREX1 | ENSG00000124126 | 682 | NP_065871.2 | X |
| PRKDC | ENSG00000253729 | 687 | NP_008835.5 | X |
| PRODH | ENSG00000100033 | 688 | NP_057419.4 | X |
| PSD3 | ENSG00000156011 | 691 | NP_056125.3 | |
| PSMD10 | ENSG00000101843 | 692 | NP_002805.1 | |
| PSMD12 | ENSG00000197170 | 693 | NP_002807.1 | |
| PTBP2 | ENSG00000117569 | 694 | NP_067013.1 | X |
| PTGER3 | ENSG00000050628 | 697 | NP_942011.1 | X |
| PTK7 | ENSG00000112655 | 699 | NP_001257327.1 | |
| PTPRC | ENSG00000262418, | 702 | NP_002829.3 | X |
| | ENSG00000081237 | 703 | | |
| PVALB | ENSG00000100362, | 705 | NP_002845.1 | |
| | ENSG00000274665 | 706 | | |
| RANBP17 | ENSG00000204764 | 715 | NP_075048.1 | X |
| RBM27 | ENSG00000091009 | 721 | NP_061862.1 | |
| RBM8A | ENSG00000265241 | 722 | NP_005096.1 | |
| RERE | ENSG00000142599 | 726 | NP_036234.3 | |
| RFWD2 | ENSG00000143207 | 727 | NP_071902.2 | X |
| RGS7 | ENSG00000182901 | 728 | NP_002915.3 | X |
| RIMS1 | ENSG00000079841 | 730 | NP_055804.2 | X |
| RIMS3 | ENSG00000117016 | 731 | NP_055562.2 | |
| RIT2 | ENSG00000152214 | 732 | NP_002921.1 | |
| RNF135 | ENSG00000181481 | 734 | NP_115698.3 | |
| RNPS1 | ENSG00000205937 | 735 | NP_542161.1 | |
| RORA | ENSG00000069667 | 738 | NP_599022.1 | X |
| RPL10 | ENSG00000147403 | 739 | NP_001243506.2 | |
| SAE1 | ENSG00000142230 | 743 | NP_005491.1 | |
| SBF1 | ENSG00000100241 | 745 | NP_002963.2 | |
| SCFD2 | ENSG00000184178 | 746 | NP_689753.2 | X |
| SCN8A | ENSG00000196876 | 752 | NP_055006.1 | |
| SCN9A | ENSG00000169432 | 753 | NP_002968.1 | X |
| SDK1 | ENSG00000146555 | 755 | NP_689957.3 | |
| SETDB1 | ENSG00000143379 | 758 | NP_001138887.1 | |
| SEZ6L2 | ENSG00000174938 | 763 | NP_001230261.1 | |
| SGSH | ENSG00000181523 | 764 | NP_000190.1 | |
| SHANK2 | ENSG00000162105 | 768 | NP_036441.2 | X |
| SHANK3 | ENSG00000251322, | 769 | NP_277052.1 | X |
| | ENSG00000283243 | 770 | | |
| SIN3A | ENSG00000169375 | 773 | NP_001138829.1 | X |
| SLC16A7 | ENSG00000118596 | 776 | NP_004722.2 | |
| SLC22A9 | ENSG00000149742 | 780 | NP_543142.2 | |
| SLC24A2 | ENSG00000155886 | 781 | NP_065077.1 | X |
| SLC25A12 | ENSG00000115840 | 782 | NP_003696.2 | |
| SLC25A14 | ENSG00000102078 | 783 | NP_003942.1 | |
| SLC25A27 | ENSG00000153291 | 786 | NP_004268.3 | X |
| SLC30A5 | ENSG00000145740 | 790 | NP_075053.2 | |
| SLC33A1 | ENSG00000169359 | 791 | NP_001177921.1 | X |
| SLC7A3 | ENSG00000165349 | 802 | NP_116192.4 | |
| SMARCA2 | ENSG00000080503 | 809 | NP_003061.3 | |
| SMARCC2 | ENSG00000139613 | 810 | NP_003066.2 | |
| SNAP25 | ENSG00000132639 | 813 | NP_003072.2 | |
| SNRPN | ENSG00000128739 | 815 | NP_073716.1 | X |
| SNX14 | ENSG00000135317 | 819 | NP_722523.1 | X |
| SOD1 | ENSG00000142168 | 821 | NP_000445.1 | |
| SOX5 | ENSG00000134532 | 822 | NP_008871.3 | |
| SPAST | ENSG00000021574 | 824 | NP_055761.2 | |
| SRCAP | ENSG00000080603 | 825 | NP_006653.2 | |
| SRGAP3 | ENSG00000196220 | 827 | NP_055665.1 | |
| ST7 | ENSG00000004866 | 830 | NP_068708.1 | X |
| ST8SIA2 | ENSG00000140557 | 831 | NP_006002.1 | |
| STXBP1 | ENSG00000136854 | 836 | NP_003156.1 | X |
| STXBP5 | ENSG00000164506 | 837 | NP_001121187.1 | |
| SUCLG2 | ENSG00000172340 | 839 | NP_001171070.1 | |
| SYN2 | ENSG00000157152 | 842 | NP_598328.1 | |
| SYN3 | ENSG00000185666 | 843 | NP_003481.3 | |
| SYNE1 | ENSG00000131018 | 844 | NP_892006.3 | X |
| SYT3 | ENSG00000213023 | 848 | NP_115674.1 | |
| TAF1 | ENSG00000147133 | 849 | NP_004597.2 | |
| TAF1C | ENSG00000103168 | 850 | NP_005670.3 | |
| TBC1D5 | ENSG00000131374 | 854 | NP_001127853.1 | |
| TBC1D7 | ENSG00000145979 | 855 | NP_001137436.1 | |
| TBL1X | ENSG00000101849 | 856 | NP_001132938.1 | |
| TBR1 | ENSG00000136535 | 858 | NP_006584.1 | |
| TCF20 | ENSG00000276461, | 860 | NP_005641.1 | |
| | ENSG00000262024, | 861 | | |
| | ENSG00000100207, | 862 | | |
| | ENSG00000280467, | 863 | | |
| | ENSG00000281897, | 864 | | |
| | ENSG00000283026, | 865 | | |
| | ENSG00000282892, | 866 | | |
| | ENSG00000283681 | 867 | | |
| TCF4 | ENSG00000196628 | 868 | NP_001230155.2 | |
| TCF7L2 | ENSG00000148737 | 869 | NP_001139746.1 | |
| TERT | ENSG00000164362 | 873 | NP_937983.2 | |
| TH | ENSG00000180176 | 876 | NP_954986.2 | |
| THRA | ENSG00000126351 | 879 | NP_003241.2 | |
| TOP3B | ENSG00000100038 | 889 | NP_003926.1 | X |
| TPO | ENSG00000115705, | 891 | NP_000538.3 | X |
| | ENSG00000277603 | 892 | | |
| TRIM33 | ENSG00000197323 | 893 | NP_056990.3 | X |
| TRIO | ENSG00000038382 | 894 | NP_009049.2 | |
| TRIP12 | ENSG00000153827 | 895 | NP_004229.1 | |
| TRPC6 | ENSG00000137672 | 896 | NP_004612.2 | X |
| TRPM1 | ENSG00000134160, | 897 | NP_001238949.1 | |
| | ENSG00000274965 | 898 | | |
| TSC1 | ENSG00000165699 | 899 | NP_000359.1 | |
| TSC2 | ENSG00000103197 | 900 | NP_000539.2 | X |
| TSN | ENSG00000211460 | 902 | NP_004613.1 | |
| TTN | ENSG00000155657 | 905 | NP_001254479.1 | X |
| TUBGCP5 | ENSG00000280807, | 906 | NP_001096080.1 | |
| | ENSG00000275835, | 907 | | |
| | ENSG00000276856 | 908 | | |
| UBE3A | ENSG00000114062 | 912 | NP_000453.2 | |
| UBE3B | ENSG00000151148 | 913 | NP_904324.1 | X |
| UBE3C | ENSG00000009335 | 914 | NP_055486.2 | |
| UPB1 | ENSG00000100024 | 922 | NP_057411.1 | |
| UPF3B | ENSG00000125351 | 924 | NP_542199.1 | |
| USP45 | ENSG00000123552 | 925 | NP_001073950.1 | |
| USP9Y | ENSG00000114374 | 927 | NP_004645.2 | |
| VIP | ENSG00000146469 | 931 | NP_003372.1 | |
| VLDLR | ENSG00000147852 | 932 | NP_003374.3 | X |
| WAC | ENSG00000095787 | 935 | NP_057712.2 | X |
| WDFY3 | ENSG00000163625 | 936 | NP_055806.2 | X |
| WNK3 | ENSG00000196632 | 938 | NP_065973.2 | X |
| WWOX | ENSG00000186153 | 941 | NP_057457.1 | X |
| ZBTB20 | ENSG00000181722 | 950 | NP_001157814.1 | X |
| ZMYND11 | ENSG00000015171 | 952 | NP_006615.2 | |
| ZNF18 | ENSG00000154957 | 953 | NP_653281.2 | |

*Representative protein in the family encoded by the gene.

TABLE 3
(152 Genes)
SFARI genes that have a very high scoring putative hnRNP L-binding
motif within 500 bp of one of the Castle splice sites.

| | | | | Genes with hnRNP |
|---|---|---|---|---|
| | | | | binding sites within |
| | | | | 200 base pairs of an |
| | | SEQ | Accession | RBFox1/A2BP1 |
| Human Gene | Ensembl Identifier | ID NO | Number* | binding site |
| A2BP1 | ENSG00000078328 | 967 | NP_665898.1 | X |
| ABCA10 | ENSG00000154263 | 2 | NP_525021.3 | |
| ACHE | ENSG00000087085 | 5 | NP_000656.1 | |
| ADAMTS18 | ENSG00000140873 | 10 | NP_955387.1 | |
| ADARB1 | ENSG00000197381 | 11 | NP_056648.1 | |
| ADNP | ENSG00000101126 | 14 | NP_056154.1 | X |
| AHI1 | ENSG00000135541 | 26 | NP_001128302.1 | |
| ANK3 | ENSG00000151150 | 35 | NP_066267.2 | |
| ANKRD11 | ENSG00000167522 | 36 | NP_001243111.1 | |
| ANXA1 | ENSG00000135046 | 38 | NP_000691.1 | |
| ARHGEF9 | ENSG00000131089 | 51 | NP_056000.1 | |
| ARID1B | ENSG00000049618 | 52 | NP_065783.3 | |
| ARNT2 | ENSG00000172379 | 53 | NP_055677.3 | |
| ASMT | ENSG00000196433 | 56 | NP_004034.2 | |
| ATP2B2 | ENSG00000157087 | 63 | NP_001001331.1 | |
| ATRNL1 | ENSG00000107518 | 65 | NP_997186.1 | X |
| ATRX | ENSG00000085224 | 66 | NP_000480.3 | |
| AUTS2 | ENSG00000158321 | 68 | NP_056385.1 | |
| BCAS1 | ENSG00000064787 | 74 | NP_003648.2 | X |
| BCKDK | ENSG00000103507 | 75 | NP_005872.2 | |
| BIN1 | ENSG00000136717 | 79 | NP_647593.1 | X |
| CACNA1B | ENSG00000148408 | 97 | NP_000709.1 | |
| CACNA1C | ENSG00000151067 | 98 | NP_955630.3 | |
| CACNA1E | ENSG00000198216 | 100 | NP_001192222.1 | |
| CACNA1F | ENSG00000102001 | 101 | NP_005174.2 | |
| CACNA1G | ENSG00000006283 | 102 | NP_061496.2 | |
| CAMTA1 | ENSG00000171735 | 113 | NP_056030.1 | X |
| CD38 | ENSG00000004468 | 124 | NP_001766.2 | |
| CD99L2 | ENSG00000102181 | 126 | NP_001229543.1 | |
| CHRNA7 | ENSG00000175344 | 146 | NP_001177384.1 | |
| CNKSR2 | ENSG00000149970 | 155 | NP_055742.2 | X |
| CNTN5 | ENSG00000149972 | 170 | NP_001230199.1 | |
| CNTNAP3 | ENSG00000106714 | 174 | NP_387504.2 | |
| CRHR2 | ENSG00000106113 | 178 | NP_001189404.1 | |
| DAPP1 | ENSG00000070190 | 198 | NP_055210.2 | |
| DDC | ENSG00000132437 | 202 | NP_001076440.1 | |
| DEAF1 | ENSG00000177030, | 206 | NP_066288.2 | |
| | ENSG00000282712 | 207 | | |
| DLG1 | ENSG00000075711 | 217 | NP_004078.2 | |
| DMD | ENSG00000198947 | 228 | NP_003997.1 | |
| DMXL2 | ENSG00000104093 | 230 | NP_001167587.1 | |
| DOCK4 | ENSG00000128512 | 239 | NP_055520.3 | |
| DOCK8 | ENSG00000107099 | 240 | NP_982272.2 | |
| DPP4 | ENSG00000197635 | 243 | NP_001926.2 | X |
| DRD2 | ENSG00000149295 | 248 | NP_000786.1 | |
| DUSP15 | ENSG00000149599 | 252 | NP_542178.2 | X |
| ELAVL2 | ENSG00000107105 | 266 | NP_004423.2 | |
| ELP4 | ENSG00000109911 | 268 | NP_061913.3 | |
| EPHB2 | ENSG00000133216 | 275 | NP_004433.2 | |
| ESR1 | ENSG00000091831 | 283 | NP_001116212.1 | |
| ESR2 | ENSG00000140009 | 284 | NP_001428.1 | |
| FMR1 | ENSG00000102081 | 312 | NP_002015.1 | |
| FOLH1 | ENSG00000086205 | 313 | NP_004467.1 | |
| FOXP1 | ENSG00000114861 | 315 | NP_001231739.1 | |
| FOXP2 | ENSG00000128573 | 316 | NP_683696.2 | |
| FRK | ENSG00000111816 | 317 | NP_002022.1 | |
| GABRB3 | ENSG00000166206 | 324 | NP_068712.1 | |
| GDA | ENSG00000119125 | 334 | NP_001229434.1 | X |
| GNAS | ENSG00000087460 | 341 | NP_536350.2 | |
| GTF2I | ENSG00000263001 | 371 | NP_127492.1 | |
| HDAC6 | ENSG00000094631 | 377 | NP_006035.2 | |
| HLA-DRB1 | ENSG00000236884, | 399 | NP_001230894.1 | |
| | ENSG00000228080, | 400 | | |
| | ENSG00000206240, | 401 | | |
| | ENSG00000229074, | 402 | | |
| | ENSG00000206306, | 403 | | |
| | ENSG00000196126 | 404 | | |
| HTR3A | ENSG00000166736 | 416 | NP_998786.2 | X |
| HTR7 | ENSG00000148680 | 418 | NP_062873.1 | |
| ICA1 | ENSG00000003147 | 422 | NP_071682.1 | |
| IQSEC2 | ENSG00000124313 | 437 | NP_001104595.1 | |
| ITPR1 | ENSG00000150995 | 442 | NP_001161744.1 | X |
| JMJD1C | ENSG00000171988 | 445 | NP_116165.1 | |
| KCNT1 | ENSG00000107147 | 459 | NP_065873.2 | |
| KHDRBS3 | ENSG00000131773 | 466 | NP_006549.1 | |
| KIF13B | ENSG00000197892 | 469 | NP_056069.2 | X |
| KIF5C | ENSG00000276734, | 470 | NP_004513.1 | |
| | ENSG00000168280 | 471 | | |
| KLC2 | ENSG00000174996 | 474 | NP_073733.1 | X |
| KMO | ENSG00000117009 | 475 | NP_003670.2 | X |
| LIN7B | ENSG00000104863 | 486 | NP_071448.1 | |
| LPL | ENSG00000175445 | 488 | NP_000228.1 | X |
| LRFN5 | ENSG00000165379 | 490 | NP_689660.2 | |
| LRRC7 | ENSG00000033122 | 495 | NP_065845.1 | X |
| MAP2 | ENSG00000078018 | 504 | NP_002365.3 | X |
| MARK1 | ENSG00000116141 | 509 | NP_061120.3 | |
| MBD1 | ENSG00000141644 | 510 | NP_001191065.1 | |
| MBD5 | ENSG00000204406 | 513 | NP_060798.2 | |
| MBD6 | ENSG00000166987 | 514 | NP_443129.3 | |
| MCC | ENSG00000171444 | 526 | NP_001078846.1 | X |
| MED12 | ENSG00000184634 | 531 | NP_005111.2 | |
| MEF2C | ENSG00000081189 | 533 | NP_001180276.1 | X |
| MET | ENSG00000105976 | 534 | NP_001120972.1 | |
| MNT | ENSG00000070444 | 538 | NP_064706.1 | |
| MSR1 | ENSG00000038945 | 543 | NP_619729.1 | |
| NBEA | ENSG00000172915 | 560 | NP_056493.3 | |
| NFIA | ENSG00000162599 | 572 | NP_001138984.1 | X |
| NIPA2 | ENSG00000140157 | 576 | NP_001171818.1 | |
| NLGN3 | ENSG00000196338 | 581 | NP_851820.1 | |
| NLGN4Y | ENSG00000165246 | 583 | NP_055708.3 | |
| NPAS2 | ENSG00000170485 | 587 | NP_002509.2 | |
| NRCAM | ENSG00000091129 | 590 | NP_001032209.1 | |
| NRG1 | ENSG00000157168 | 591 | NP_039250.2 | X |
| NRXN1 | ENSG00000179915 | 593 | NP_001129131.1 | X |
| NRXN3 | ENSG00000021645 | 595 | NP_004787.2 | |
| NTRK3 | ENSG00000140538 | 599 | NP_001012338.1 | X |
| OGT | ENSG00000147162 | 606 | NP_858058.1 | |
| P4HA2 | ENSG00000072682 | 618 | NP_001136071.1 | |
| PAH | ENSG00000171759 | 621 | NP_000268.1 | |
| PAX6 | ENSG00000007372 | 625 | NP_001245391.1 | X |
| PLXNB1 | ENSG00000164050 | 671 | NP_001123554.1 | |
| PSD3 | ENSG00000156011 | 691 | NP_056125.3 | |
| PTBP2 | ENSG00000117569 | 694 | NP_067013.1 | X |
| PTGER3 | ENSG00000050628 | 697 | NP_942011.1 | X |
| PTK7 | ENSG00000112655 | 699 | NP_001257327.1 | |
| PTPRC | ENSG00000262418, | 702 | NP_002829.3 | X |
| | ENSG00000081237 | 703 | | |
| RBM8A | ENSG00000265241 | 722 | NP_005096.1 | |
| RERE | ENSG00000142599 | 726 | NP_036234.3 | |
| RGS7 | ENSG00000182901 | 728 | NP_002915.3 | |
| RIMS1 | ENSG00000079841 | 730 | NP_055804.2 | |
| RNPS1 | ENSG00000205937 | 735 | NP_542161.1 | |
| RPL10 | ENSG00000147403 | 739 | NP_001243506.2 | |
| SAE1 | ENSG00000142230 | 743 | NP_005491.1 | |
| SCFD2 | ENSG00000184178 | 746 | NP_689753.2 | |
| SCN9A | ENSG00000169432 | 753 | NP_002968.1 | |
| SDK1 | ENSG00000146555 | 755 | NP_689957.3 | |
| SHANK2 | ENSG00000162105 | 768 | NP_036441.2 | |
| SIN3A | ENSG00000169375 | 773 | NP_001138829.1 | X |
| SLC24A2 | ENSG00000155886 | 781 | NP_065077.1 | X |
| SLC25A14 | ENSG00000102078 | 783 | NP_003942.1 | |
| SLC33A1 | ENSG00000169359 | 791 | NP_001177921.1 | X |
| SLC7A3 | ENSG00000165349 | 802 | NP_116192.4 | |
| SMARCA2 | ENSG00000080503 | 809 | NP_003061.3 | |
| SNRPN | ENSG00000128739 | 815 | NP_073716.1 | X |
| SPAST | ENSG00000021574 | 824 | NP_055761.2 | |
| SRGAP3 | ENSG00000196220 | 827 | NP_055665.1 | |
| ST7 | ENSG00000004866 | 830 | NP_068708.1 | |
| STXBP5 | ENSG00000164506 | 837 | NP_001121187.1 | |
| SYN3 | ENSG00000185666 | 843 | NP_003481.3 | |
| SYNE1 | ENSG00000131018 | 844 | NP_892006.3 | |
| TAF1 | ENSG00000147133 | 849 | NP_004597.2 | |
| TAF1C | ENSG00000103168 | 850 | NP_005670.3 | |
| TBL1X | ENSG00000101849 | 856 | NP_001132938.1 | |
| TCF20 | ENSG00000276461, | 860 | NP_005641.1 | |
| | ENSG00000262024, | 861 | | |
| | ENSG00000100207, | 862 | | |
| | ENSG00000280467, | 863 | | |
| | ENSG00000281897, | 864 | | |
| | ENSG00000283026, | 865 | | |
| | ENSG00000282892, | 866 | | |
| | ENSG00000283681 | 867 | | |
| TERT | ENSG00000164362 | 873 | NP_937983.2 | |
| THRA | ENSG00000126351 | 879 | NP_003241.2 | |
| TOP3B | ENSG00000100038 | 889 | NP_003926.1 | X |
| TPO | ENSG00000115705, | 891 | NP_000538.3 | |
| | ENSG00000277603 | 892 | | |
| TSC2 | ENSG00000103197 | 900 | NP_000539.2 | |
| TTN | ENSG00000155657 | 905 | NP_001254479.1 | |
| UBE3B | ENSG00000151148 | 913 | NP_904324.1 | |
| UPF3B | ENSG00000125351 | 924 | NP_542199.1 | |
| USP45 | ENSG00000123552 | 925 | NP_001073950.1 | |
| VIP | ENSG00000146469 | 931 | NP_003372.1 | |
| WAC | ENSG00000095787 | 935 | NP_057712.2 | |
| WWOX | ENSG00000186153 | 941 | NP_057457.1 | X |
| ZBTB20 | ENSG00000181722 | 950 | NP_001157814.1 | |
| ZMYND11 | ENSG00000015171 | 952 | NP_006615.2 | |
| ZNF18 | ENSG00000154957 | 953 | NP_653281.2 | |

*Representative protein in the family encoded by the gene.

TABLE 4
(78 Genes)
SFARI gene list with hnRNP L binding sites near splice
events specifically observed in autism.

| | | | | Genes with hnRNP |
|---|---|---|---|---|
| | | | | binding sites within |
| | | | | 200 base pairs of an |
| | | SEQ | Accession | RBFox1/A2BP1 |
| Human Gene | Ensembl Identifier | ID NO | Number* | binding site |
| ADCY5 | ENSG00000173175 | 12 | NP_899200.1 | |
| ANK2 | ENSG00000145362 | 34 | NP_001139.3 | |
| ANKRD11 | ENSG00000167522 | 36 | NP_001243111.1 | |
| ANKS1B | ENSG00000185046 | 37 | NP_690001.3 | X |
| APC | ENSG00000134982 | 42 | NP_001120982.1 | |
| ASTN2 | ENSG00000148219 | 58 | NP_054729.3 | |
| ATG7 | ENSG00000197548 | 60 | NP_006386.1 | |
| ATXN7 | ENSG00000163635 | 67 | NP_001170858.1 | X |
| BAIAP2 | ENSG00000175866 | 72 | NP_059345.1 | |
| BCAS1 | ENSG00000064787 | 74 | NP_003648.2 | X |
| CACNA1C | ENSG00000151067 | 98 | NP_955630.2 | |
| CACNA1E | ENSG00000198216 | 100 | NP_001192222.1 | |
| CACNA1G | ENSG00000006283 | 102 | NP_061496.2 | |
| CADM1 | ENSG00000182985 | 107 | NP_055148.3 | |
| CADPS2 | ENSG00000081803 | 109 | NP_001161412.1 | |
| CAMSAP2 | ENSG00000118200 | 112 | NP_982284.1 | |
| CAMTA1 | ENSG00000171735 | 113 | NP_056030.1 | X |
| CASC4 | ENSG00000166734 | 116 | NP_612432.2 | |
| CSMD1 | ENSG00000183117 | 179 | NP_150094.5 | X |
| CSNK1D | ENSG00000141551 | 180 | NP_001884.2 | |
| CUL7 | ENSG00000044090 | 187 | NP_001161842.1 | |
| DAPK1 | ENSG00000196730 | 197 | NP_004929.2 | |
| DST | ENSG00000151914 | 251 | NP_056363.2 | |
| ERBB4 | ENSG00000178568 | 279 | NP_005226.1 | X |
| GNAS | ENSG00000087460 | 341 | NP_536350.2 | X |
| GRIN1 | ENSG00000176884 | 358 | NP_001172019.1 | X |
| GSN | ENSG00000148180 | 369 | NP_000168.1 | |
| GTF2I | ENSG00000263001 | 371 | NP_127492.1 | |
| HDAC3 | ENSG00000171720 | 375 | NP_003874.2 | |
| HMGN1 | ENSG00000205581 | 405 | NP_004956.5 | |
| HUWE1 | ENSG00000086758 | 419 | NP_113584.3 | |
| KCNMA1 | ENSG00000156113 | 455 | NP_001154824.1 | |
| KCNQ2 | ENSG00000281151, | 456 | NP_742105.1 | |
| | ENSG00000075043 | 457 | | |
| KMT2A | ENSG00000118058 | 476 | NP_005924.2 | X |
| LAMB1 | ENSG00000091136 | 483 | NP_002282.2 | X |
| MAOB | ENSG00000069535 | 503 | NP_000889.3 | X |
| MAP2 | ENSG00000078018 | 504 | NP_002365.3 | X |
| MARK1 | ENSG00000116141 | 509 | NP_061120.3 | |
| MBD1 | ENSG00000141644 | 510 | NP_001191065.1 | X |
| MBD6 | ENSG00000166987 | 514 | NP_443129.3 | |
| MEF2C | ENSG00000081189 | 533 | NP_001180276.1 | X |
| MPP6 | ENSG00000105926 | 540 | NP_057531.2 | |
| MTOR | ENSG00000198793 | 546 | NP_004949.1 | |
| MYO9B | ENSG00000099331 | 553 | NP_004136.2 | X |
| NELL1 | ENSG00000165973 | 569 | NP_006148.2 | |
| NEO1 | ENSG00000067141 | 570 | NP_002490.2 | X |
| NFIX | ENSG00000008441 | 573 | NP_001257972.1 | X |
| NPAS2 | ENSG00000170485 | 587 | NP_002509.2 | |
| NRCAM | ENSG00000091129 | 590 | NP_001032209.1 | X |
| NRXN1 | ENSG00000179915 | 593 | NP_001129131.1 | X |
| NRXN3 | ENSG00000021645 | 595 | NP_004787.2 | X |
| OGT | ENSG00000147162 | 606 | NP_858058.1 | |
| P4HA2 | ENSG00000072682 | 618 | NP_001136071.1 | |
| PAFAH1B1 | ENSG00000007168 | 620 | NP_000421.1 | |
| PER1 | ENSG00000179094 | 654 | NP_002607.2 | X |
| PRKD1 | ENSG00000184304 | 686 | NP_002733.2 | |
| PRUNE2 | ENSG00000106772 | 690 | NP_056040.2 | |
| RAPGEF4 | ENSG00000091428 | 716 | NP_008954.2 | |
| RBFOX1/ | ENSG00000078328 | 720 | NP_665898.1 | |
| A2BP1 | | | | |
| RFWD2 | ENSG00000143207 | 727 | NP_071902.2 | X |
| RGS7 | ENSG00000182901 | 728 | NP_002915.3 | X |
| RIMS1 | ENSG00000079841 | 730 | NP_055804.2 | X |
| SCN1A | ENSG00000144285 | 747 | NP_001159435.1 | |
| SCN8A | ENSG00000196876 | 752 | NP_055006.1 | |
| SETD5 | ENSG00000168137 | 760 | NP_001073986.1 | |
| SGSH | ENSG00000181523 | 764 | NP_000190.1 | X |
| SMARCC2 | ENSG00000139613 | 810 | NP_003066.2 | |
| SNAP25 | ENSG00000132639 | 813 | NP_003072.2 | |
| ST7 | ENSG00000004866 | 830 | NP_068708.1 | X |
| SYNE1 | ENSG00000131018 | 844 | NP_892006.3 | |
| TBC1D5 | ENSG00000131374 | 854 | NP_001127853.1 | |
| TBC1D7 | ENSG00000145979 | 855 | NP_001137436.1 | |
| TCF4 | ENSG00000196628 | 868 | NP_001230155.1 | |
| TLK2 | ENSG00000146872 | 880 | NP_006843.2 | |
| TRIM33 | ENSG00000197323 | 893 | NP_056990.3 | |
| TSC2 | ENSG00000103197 | 900 | NP_000539.2 | |
| WDFY3 | ENSG00000163625 | 936 | NP_055806.2 | |
| ZBTB16 | ENSG00000109906 | 949 | NP_005997.2 | |

*Representative protein in the family encoded by the gene.

TABLE 5
(27 Genes)
Genes bearing the hnRNP L binding site, that comprise the SHANK-TSC-
mTOR-ERK ASD-associated pathways (pathways described in Goldani et al.,
Biomarkers in autism. Front Psychiatry. 2014 Aug. 12; 5: 100).

| Gene symbol | Table # | Name in Ref Figures | Patient cohort | Comment |
|---|---|---|---|---|
| NRXN1 | 2, 3, 4 | Neurexin, NRX | | |
| NRXN2 | 2 | Neurexin, NRX | | Established |
| | | | | target of |
| | | | | hnRNP L (ii) |
| NRXN3 | 2, 3, 4 | Neurexin, NRX | | |
| NLGN3 | 2, 3 | Neuroligin, NLGN | | |
| NLGN4X | 2 | Neuroligin, NLGN | | |
| NLGN4Y | 2, 3 | Neuroligin, NLGN | | |
| SHANK2 | 2, 3 | SHANK | | |
| SHANK3 | 2 | SHANK | | |
| NF1 | 2 | NF1 | Neurofibromatosis | Multiple splice |
| | | | | site mutations |
| TSC1 | 2 | TSC1 | Tuberous sclerosis | Multiple splice |
| | | | | site mutations |
| TSC2 | 2, 3, 4 | TSC2 | Tuberous sclerosis | Multiple splice |
| | | | | site mutations |
| MTOR | 4 | mTOR | | |
| FMR1 | 2, 3 | FMRP, FMR1 | (Fragile X syndrome) | |
| EIF4E | 2 | eiF4E | | |
| CACNA1C | 2, 3, 4 | CACNA1C | (Timothy syndrome) | |
| GRIN1 | 2, 4 | NMDAR | | |
| GRM1 | 2 | mGluR | | |
| DRD2 | 2, 3 | DRD2 | | |
| MAPK3 | 2 | ERK | | |
| GSK3B | 2 | GSK-3β | | |
| GABRB3 | 2, 3 | GABAR | | |
| SCN1A | 4 | Scn1A | | |
| MET | 2, 3 | MET | | |
| HRAS | 2 | Ras | | |
| VLDLR | 2 | VLDLR | | |
| AKAP9 | 2 | PKA | | |
| CADPS2 | 2, 4 | CADPS2 | | presynaptic |

TABLE 6
(18 Genes)
Genes bearing the hnRNP L binding site, that comprise
the SHANK-TSC- ASD disease module (i, ii).

| Gene symbol | Table # | Name in Ref Figures | Patient cohort | Comment |
|---|---|---|---|---|
| NRXN1 | 2, 3, 4 | Neurexin, NRX | | |
| NRXN2 | 2 | Neurexin, NRX | | Established |
| | | | | target of |
| | | | | hnRNP L (ii) |
| NRXN3 | 2, 3, 4 | Neurexin, NRX | | |
| NLGN3 | 2, 3 | Neuroligin, NLGN | | |
| NLGN4X | 2 | Neuroligin, NLGN | | |
| NLGN4Y | 2, 3 | Neuroligin, NLGN | | |
| SHANK2 | 2, 3 | SHANK | | |
| SHANK3 | 2 | SHANK | | |
| NF1 | 2 | NF1 | Neurofibromatosis | Multiple splice |
| | | | | site mutations |
| TSC1 | 2 | TSC1 | Tuberous sclerosis | Multiple splice |
| | | | | site mutations |
| TSC2 | 2, 3, 4 | TSC2 | Tuberous sclerosis | Multiple splice |
| | | | | site mutations |
| MTOR | 4 | mTOR | | |
| FMR1 | 2, 3 | FMRP, FMR1 | (Fragile X syndrome) | |
| EIF4E | 2 | eiF4E | | |
| CACNA1C | 2, 3, 4 | CACNA1C | (Timothy syndrome) | |
| GRIN1 | 2, 4 | NMDAR | | |
| GRM1 | 2 | mGluR | | |
| CADPS2 | 2, 4 | CADPS2, CAPS2 | | presynaptic |

[0293] i. Peça J., Feng G. Epub 2012 Mar. 20. Cellular and synaptic network defects in autism. Curr Opin Neurobiol. 2012 October; 22(5):866-72.
[0294] ii. Sadakata et al., Mouse models of mutations and variations in autism spectrum disorder-associated genes: mice expressing Caps2/Cadps2 copy number and alternative splicing variants. Int J Environ Res Public Health. 2013 Nov. 27; 10(12):6335-53.
[0295] iii. G. Rozic & Z. Lupowitz & N. Zisapel, Exonal Elements and Factors Involved in the Depolarization-Induced Alternative Splicing of Neurexin 2, J Mol Neurosci (2013) 50:221-233.
[0296] iv. Gauthier J, et al., Truncating mutations in NRXN2 and NRXN1 in autism spectrum disorders and schizophrenia. Hum Genet. 2011 October; 130(4):563-73.

### Other Embodiments

[0297] While the invention has been described in conjunction with the detailed description thereof, the foregoing description is intended to illustrate and not limit the scope of the invention, which is defined by the scope of the appended claims. Other aspects, advantages, and modifications are within the scope of the following claims.

[0298] The patent and scientific literature referred to herein establishes the knowledge that is available to those with skill in the art. All United States patents and published or unpublished United States patent applications cited herein are incorporated by reference. All published foreign patents and patent applications cited herein are hereby incorporated by reference. Genbank and NCBI submissions indicated by accession number cited herein are hereby incorporated by reference. All other published references, documents, manuscripts and scientific literature cited herein are hereby incorporated by reference.

[0299] While this invention has been particularly shown and described with references to preferred embodiments thereof, it will be understood by those skilled in the art that various changes in form and details may be made therein without departing from the scope of the invention encompassed by the appended claims.

### INCORPORATION BY REFERENCE

[0300] All of the cited U.S. patents, U.S. patent application publications and PCT patent applications designating the U.S., are hereby incorporated by reference in their entirety.

### EQUIVALENTS

[0301] While several embodiments of the present invention have been described and illustrated herein, those of ordinary skill in the art will readily envision a variety of other means and/or structures for performing the functions and/or obtaining the results and/or one or more of the advantages described herein, and each of such variations and/or modifications is deemed to be within the scope of the present invention. Those skilled in the art will recognize, or be able to ascertain using no more than routine experimentation, many equivalents to the specific embodiments of the invention described herein. It is, therefore, to be understood that the foregoing embodiments are presented by way of example only and that, within the scope of the appended claims and equivalents thereto; the invention may be practiced otherwise than as specifically described and claimed.

The application's sequence listing, which the Patent Office published only in electronic form, follows.

SEQUENCE LISTING (978 sequences)

SEQ ID NO: 1 - protein, 500 aa, Homo sapiens
MASMLLAQRLACSFQHSYRLLVPGSRHISQAAAKVDVEFDYDGPLMKTEVPGPRSQELMKQLNIIQNAEAVHFFCNYEESRGNYLVDVDGNRMLDLYSQISSVPIGYSHPALLKLIQQPQNASMFVNRPALGILPPENFVEKLRQSLLSVAPKGMSQLITMACGSCSNENALKTIFMWYRSKERGQRGFSQEELETCMINQAPGCPDYSILSFMGAFHGRTMGCLATTHSKAIHKIDIPSFDWPIAPFPRLKYPLEEFVKENQQEEARCLEEVEDLIVKYRKKKKTVAGIIVEPIQSEGGDNHASDDFFRKLRDIARKHGCAFLVDEVQTGGGCTGKFWAHEHWGLDDPADVMTFSKKMMTGGFFHKEEFRPNAPYRIFNTWLGDPSKNLLLAEVINIIKREDLLNNAAHAGKALLTGLLDLQARYPQFISRVRGRGTFCSFDTPDDSIRNKLILIARNKGVVLGGCGDKSIRFRPTLVFRDHHAHLFLNIFSDILADFK

SEQ ID NO: 2 - protein, 1543 aa, Homo sapiens
MNKMALASFMKGRTVIGTPDEETMDIELPKKYHEMVGVIFSDTFSYRLKFNWGYRIPVIKEHSEYTEHCWAMHGEIFCYLAKYWLKGFVAFQAAINAAIIEVTTNHSVMEELTSVIGINMKIPPFISKGEIMNEWFHFTCLVSFSSFIYFASLNVARERGKFKKLMTVMGLRESAFWLSWGLTYICFIFIMSIFMALVITSIPIVFHTGFMVIFTLYSLYGLSLIALAFLMSVLIRKPMLAGLAGFLFTVFWGCLGFTVLYRQLPLSLGWVLSLLSPFAFTAGMAQITHLDNYLSGVIFPDPSGDSYKMIATFFILAFDTLFYLIFTLYFERVLPDKDGHGDSPLFFLKSSFWSKHQNTHHEIFENEINPEHSSDDSFEPVSPEFHGKEAIRIRNVIKEYNGKTGKVEALQGIFFDIYEGQITAILGHNGAGKSTLLNILSGLSVSTEGSATIYNTQLSEITDMEEIRKNIGFCPQFNFQFDFLTVRENLRVFAKIKGIQPKEVEQEVKRIIMELDMQSIQDIIAKKLSGGQKRKLTLGIAILGDPQVLLLDEPTAGLDPFSRHRVWSLLKEHKVDRLILFSTQFMDEADILADRKVFLSNGKLKCAGSSLFLKRKWGIGYHLSLHRNEMCDTEKITSLIKQHIPDAKLTTESEEKLVYSLPLEKTNKFPDLYSDLDKCSDQGIRNYAVSVTSLNEVFLNLEGKSAIDEPDFDIGKQEKIHVTRNTGDESEMEQVLCSLPETRKAVSSAALWRRQIYAVATLRFLKLRRERRALLCLLLVLGIAFIPIILEKIMYKVTRETHCWEFSPSMYFLSLEQIPKTPLTSLLIVNNTGSNIEDLVHSLKCQDIVLEIDDFRNRNGSDDPSYNGAIIVSGDQKDYRFSVACNTKKLNCFPVLMGIVSNALMGIFNFTELIQMESTSFSRDDIVLDLGFIDGSIFLLLITNCVSPFIGMSSISDYKKNVQSQLWISGLWPSAYWCGQALVDIPLYFLILFSIHLIYYFIFLGFQLSWELMFVLVVCIIGCAVSLIFLTYVLSFIFRKWRKNNGFWSFGFFIILICVSTIMVSTQYEKLNLILCMIFIPSFTLLGYVMLLIQLDFMRNLDSLDNRINEVNKTILLTTLIPYLQSVIFLFVIRCLEMKYGNEIMNKDPVFRISPRSRETHPNPEEPEEEDEDVQAERVQAANALTAPNLEEEPVITASCLHKEYYETKKSCFSTRKKKIAIRNVSFCVKKGEVLGLLGHNGAGKSTSIKMITGCTKPTAGVVVLQGSRASVRQQHDNSLKFLGYCPQENSLWPKLTMKEHLELYAAVKGLGKEDAALSISRLVEALKLQEQLKAPVKTLSEGIKRKLCFVLSILGNPSVVLLDEPFTGMDPEGQQQMWQILQATVKNKERGTLLTTHYMSEAEAVCDRMAMMVSGTLRCIGSIQHLKNKFGRDYLLEIKMKEPTQVEALHTEILKLFPQAAWQERYSSLMAYKLPVEDVHPLSRAFFKLEAMKQTFNLEEYSLSQATLEQVFLELCKEQELGNVDDKIDTTVEWKLLPQEDP

SEQ ID NO: 3 - protein, 2146 aa, Homo sapiens
MAFWTQLMLLLWKNFMYRRRQPVQLLVELLWPLFLFFILVAVRHSHPPLEHHECHFPNKPLPSAGTVPWLQGLICNVNNTCFPQLTPGEEPGRLSNFNDSLVSRLLADARTVLGGASAHRTLAGLGKLIATLRAARSTAQPQPTKQSPLEPPMLDVAELLTSLLRTESLGLALGQAQEPLHSLLEAAEDLAQELLALRSLVELRALLQRPRGTSGPLELLSEALCSVRGPSSTVGPSLNWYEASDLMELVGQEPESALPDSSLSPACSELIGALDSHPLSRLLWRRLKPLILGKLLFAPDTPFTRKLMAQVNRTFEELTLLRDVREVWEMLGPRIFTFMNDSSNVAMLQRLLQMQDEGRRQPRPGGRDHMEALRSFLDPGSGGYSWQDAHADVGHLVGTLGRVTECLSLDKLEAAPSEAALVSRALQLLAEHRFWAGVVFLGPEDSSDPTEHPTPDLGPGHVRIKIRMDIDVVTRTNKIRDRFWDPGPAADPLTDLRYVWGGFVYLQDLVERAAVRVLSGANPRAGLYLQQMPYPCYVDDVFLRVLSRSLPLFLTLAWIYSVTLTVKAVVREKETRLRDTMRAMGLSRAVLWLGWFLSCLGPFLLSAALLVLVLKLGDILPYSHPGVVFLFLAAFAVATVTQSFLLSAFFSRANLAAACGGLAYFSLYLPYVLCVAWRDRLPAGGRVAASLLSPVAFGFGCESLALLEEQGEGAQWHNVGTRPTADVFSLAQVSGLLLLDAALYGLATWYLEAVCPGQYGIPEPWNFPFRRSYWCGPRPPKSPAPCPTPLDPKVLVEEAPPGLSPGVSVRSLEKRFPGSPQPALRGLSLDFYQGHITAFLGHNGAGKTTTLSILSGLFPPSGGSAFILGHDVRSSMAAIRPHLGVCPQYNVLFDMLTVDEHVWFYGRLKGLSAAVVGPEQDRLLQDVGLVSKQSVQTRHLSGGMQRKLSVAIAFVGGSQVVILDEPTAGVDPASRRGIWELLLKYREGRTLILSTHHLDEAELLGDRVAVVAGGRLCCCGSPLFLRRHLGSGYYLTLVKARLPLTTNEKADTDMEGSVDTRQEKKNGSQGSRVGTPQLLALVQHWVPGARLVEELPHELVLVLPYTGAHDGSFATLFRELDTRLAELRLTGYGISDTSLEEIFLKVVEECAADTDMEDGSCGQHLCTGIAGLDVTLRLKMPPQETALENGEPAGSAPETDQGSGPDAVGRVQGWALTRQQLQALLLKRFLLARRSRRGLFAQIVLPALFVGLALVFSLIVPPFGHYPALRLSPTMYGAQVSFFSEDAPGDPGRARLLEALLQEAGLEEPPVQHSSHRFSAPEVPAEVAKVLASGNWTPESPSPACQCSRPGARRLLPDCPAAAGGPPPPQAVTGSGEVVQNLTGRNLSDFLVKTYPRLVRQGLKTKKWVNEVRYGGFSLGGRDPGLPSGQELGRSVEELWALLSPLPGGALDRVLKNLTAWAHSLDAQDSLKIWFNNKGWHSMVAFVNRASNAILRAHLPPGPARHAHSITTLNHPLNLTKEQLSEGALMASSVDVLVSICVVFAMSFVPASFTLVLIEERVTRAKHLQLMGGLSPTLYWLGNFLWDMCNYLVPACIVVLIFLAFQQRAYVAPANLPALLLLLLLYGWSITPLMYPASFFFSVPSTAYVVLTCINLFIGINGSMATFVLELFSDQKLQEVSRILKQVFLIFPHFCLGRGLIDMVRNQAMADAFERLGDRQFQSPLRWEVVGKNLLAMVIQGPLFLLFTLLLQHRSQLLPQPRVRSLPLLGEEDEDVARERERVVQGATQGDVLVLRNLTKVYRGQRMPAVDRLCLGIPPGECFGLLGVNGAGKTSTFRMVTGDTLASRGEAVLAGHSVAREPSAAHLSMGYCPQSDAIFELLTGREHLELLARLRGVPEAQVAQTAGSGLARLGLSWYADRPAGTYSGGNKRKLATALALVGDPAVVFLDEPTTGMDPSARRFLWNSLLAVVREGRSVMLTSHSMEECEALCSRLAIMVNGRFRCLGSPQHLKGRFAAGHTLTLRVPAARSQPAAAFVAAEFPGAELREAHGGRLRFQLPPGGRCALARVFGELAVHGAEHGVEDFSVSQTMLEEVFLYFSKDQGKDEDTEEQKEAGVGVDPAPGLQHPKRVSQFLDDPSTAETVL

SEQ ID NO: 4 - protein, 1306 aa, Homo sapiens
MGAASGRRGPGLLLPLPLLLLLPPQPALALDPGLQPGNFSADEAGAQLFAQSYNSSAEQVLFQSVAASWAHDTNITAENARRQEEAALLSQEFAEAWGQKAKELYEPIWQNFTDPQLRRIIGAVRTLGSANLPLAKRQQYNALLSNMSRIYSTAKVCLPNKTATCWSLDPDLTNILASSRSYAMLLFAWEGWHNAAGIPLKPLYEDFTALSNEAYKQDGFTDTGAYWRSWYNSPTFEDDLEHLYQQLEPLYLNLHAFVRRALHRRYGDRYINLRGPIPAHLLGDMWAQSWENIYDMVVPFPDKPNLDVTSTMLQQGWNATHMFRVAEEFFTSLELSPMPPEFWEGSMLEKPADGREVVCHASAWDFYNRKDFRIKQCTRVTMDQLSTVHHEMGHIQYYLQYKDLPVSLRRGANPGFHEAIGDVLALSVSTPEHLHKIGLLDRVTNDTESDINYLLKMALEKIAFLPFGYLVDQWRWGVFSGRTPPSRYNFDWWYLRTKYQGICPPVTRNETHFDAGAKFHVPNVTPYIRYFVSFVLQFQFHEALCKEAGYEGPLHQCDIYRSTKAGAKLRKVLQAGSSRPWQEVLKDMVGLDALDAQPLLKYFQPVTQWLQEQNQQNGEVLGWPEYQWHPPLPDNYPEGIDLVTDEAEASKFVEEYDRTSQVVWNEYAEANWNYNTNITTETSKILLQKNMQIANHTLKYGTQARKFDVNQLQNTTIKRIIKKVQDLERAALPAQELEEYNKILLDMETTYSVATVCHPNGSCLQLEPDLTNVMATSRKYEDLLWAWEGWRDKAGRAILQFYPKYVELINQAARLNGYVDAGDSWRSMYETPSLEQDLERLFQELQPLYLNLHAYVRRALHRHYGAQHINLEGPIPAHLLGNMWAQTWSNIYDLVVPFPSAPSMDTTEAMLKQGWTPRRMFKEADDFFTSLGLLPVPPEFWNKSMLEKPTDGREVVCHASAWDFYNGKDFRIKQCTTVNLEDLVVAHHEMGHIQYFMQYKDLPVALREGANPGFHEAIGDVLALSVSTPKHLHSLNLLSSEGGSDEHDINFLMKMALDKIAFIPFSYLVDQWRWRVFDGSITKENYNQEWWSLRLKYQGLCPPVPRTQGDFDPGAKFHIPSSVPYIRYFVSFIIQFQFHEALCQAAGHTGPLHKCDIYQSKEAGQRLATAMKLGFSRPWPEAMQLITGQPNMSASAMLSYFKPLLDWLRTENELHGEKLGWPQYNWTPNSARSEGPLPDSGRVSFLGLDLDAQQARVGQWLLLFLGIALLVATLGLSQRLFSIRHRSLHRHSHGPQFGSEVELRHS

SEQ ID NO: 5 - protein, 614 aa, Homo sapiens
MRPPQCLLHTPSLASPLLLLLLWLLGGGVGAEGREDAELLVTVRGGRLRGIRLKTPGGPVSAFLGIPFAEPPMGPRRFLPPEPKQPWSGVVDATTFQSVCYQYVDTLYPGFEGTEMWNPNRELSEDCLYLNVWTPYPRPTSPTPVLVWIYGGGFYSGASSLDVYDGRFLVQAERTVLVSMNYRVGAFGFLALPGSREAPGNVGLLDQRLALQWVQENVAAFGGDPTSVTLFGESAGAASVGMHLLSPPSRGLFHRAVLQSGAPNGPWATVGMGEARRRATQLAHLVGCPPGGTGGNDTELVACLRTRPAQVLVNHEWHVLPQESVFRFSFVPVVDGDFLSDTPEALINAGDFHGLQVLVGVVKDEGSYFLVYGAPGFSKDNESLISRAEFLAGVRVGVPQVSDLAAEAVVLHYTDWLHPEDPARLREALSDVVGDHNVVCPVAQLAGRLAAQGARVYAYVFEHRASTLSWPLWMGVPHGYEIEFIFGIPLDPSRNYTAEEKIFAQRLMRYWANFARTGDPNEPRDPKAPQWPPYTAGAQQYVSLDLRPLEVRRGLRAQACAFWNRFLPKLLSATDTLDEAERQWKAEFHRWSSYMVHWKNQFDHYSKQDRCSDL

SEQ ID NO: 6 - protein, 911 aa, Homo sapiens
MVDYHAANQSYQYGPSSAGNGAGGGGSMGDYMAQEDDWDRDLLLDPAWEKQQRKTFTAWCNSHLRKAGTQIENIDEDFRDGLKLMLLLEVISGERLPKPERGKMRVHKINNVNKALDFIASKGVKLVSIGAEEIVDGNAKMTLGMIWTIILRFAIQDISVEETSAKEGLLLWCQRKTAPYKNVNVQNFHISWKDGLAFNALIHRHRPELIEYDKLRKDDPVTNLNNAFEVAEKYLDIPKMLDAEDIVNTARPDEKAIMTYVSSFYHAFSGAQKAETAANRICKVLAVNQENEHLMEDYEKLASDLLEWIRRTIPWLEDRVPQKTIQEMQQKLEDFRDYRRVHKPPKVQEKCQLEINFNTLQTKLRLSNRPAFMPSEGKMVSDINNGWQHLEQAEKGYEEWLLNEIRRLERLDHLAEKFRQKASIHEAWTDGKEAMLKHRDYETATLSDIKALIRKHEAFESDLAAHQDRVEQIAAIAQELNELDYYDSHNVNTRCQKICDQWDALGSLTHSRREALEKTEKQLEAIDQLHLEYAKRAAPFNNWMESAMEDLQDMFIVHTIEEIEGLISAHDQFKSTLPDADREREAILAIHKEAQRIAESNHIKLSGSNPYTTVTPQIINSKWEKVQQLVPKRDHALLEEQSKQQSNEHLRRQFASQANVVGPWIQTKMEEIGRISIEMNGTLEDQLSHLKQYERSIVDYKPNLDLLEQQHQLIQEALIFDNKHTNYTMEHIRVGWEQLLTTIARTINEVENQILTRDAKGISQEQMQEFRASFNHFDKDHGGALGPEEFKACLISLGYDVENDRQGEAEFNRIMSLVDPNHSGLVTFQAFIDFMSRETTDTDTADQVIASFKVLAGDKNFITAEELRRELPPDQAEYCIARMAPYQGPDAVPGALDYKSFSTALYGESDL

SEQ ID NO: 7 - skipped

SEQ ID NO: 8 - protein, 408 aa, Homo sapiens
MTSKGPEEEHPSVTLFRQYLRIRTVQPKPDYGAAVAFFEETARQLGLGCQKVEVAPGYVVTVLTWPGTNPTLSSILLNSHTDVVPVFKEHWSHDPFEAFKDSEGYIYARGAQDMKCVSIQYLEAVRRLKVEGHRFPRTIHMTFVPDEEVGGHQGMELFVQRPEFHALRAGFALDEGIANPTDAFTVFYSERSPWWVRVTSTGRPGHASRFMEDTAAEKLHKVVNSILAFREKEWQRLQSNPHLKEGSVTSVNLTKLEGGVAYNVIPATMSASFDFRVAPDVDFKAFEEQLQSWCQAAGEGVTLEFAQKWMHPQVTPTDDSNPWWAAFSRVCKDMNLTLEPEIMPAATDNRYIRAVGVPALGFSPMNRTPVLLHDHDERLHEAVFLRGVDIYTRLLPALASVPALPSDS

SEQ ID NO: 9 - protein, 363 aa, Homo sapiens
MAQTPAFDKPKVELHVHLDGSIKPETILYYGRRRGIALPANTAEGLLNVIGMDKPLTLPDFLAKFDYYMPAIAGCREAIKRIAYEFVEMKAKEGVVYVEVRYSPHLLANSKVEPIPWNQAEGDLTPDEVVALVGQGLQEGERDFGVKARSILCCMRHQPNWSPKVVELCKKYQQQTVVAIDLAGDETIPGSSLLPGHVQAYQEAVKSGIHRTVHAGEVGSAEVVKEAVDILKTERLGHGYHTLEDQALYNRLRQENMHFEICPWSSYLTGAWKPDTEHAVIRLKNDQANYSLNTDDPLIFKSTLDTDYQMTKRDMGFTEEEFKRLNINAAKSSFLPEDEKRELLDLLYKAYGMPPSASAGQNL

SEQ ID NO: 10 - protein, 1221 aa, Homo sapiens
MECALLLACAFPAAGSGPPRGLAGLGRVAKALQLCCLCCASVAAALASDSSSGASGLNDDYVFVTPVEVDSAGSYISHDILHNGRKKRSAQNARSSLHYRFSAFGQELHLELKPSAILSSHFIVQVLGKDGASETQKPEVQQCFYQGFIRNDSSSSVAVSTCAGLSGLIRTRKNEFLISPLPQLLAQEHNYSSPAGHHPHVLYKRTAEEKIQRYRGYPGSGRNYPGYSPSHIPHASQSRETEYHHRRLQKQHFCGRRKKYAPKPPTEDTYLRFDEYGSSGRPRRSAGKSQKGLNVETLVVADKKMVEKHGKGNVTTYILTVMNMVSGLFKDGTIGSDINVVVVSLILLEQEPGGLLINHHADQSLNSFCQWQSALIGKNGKRHDHAILLTGFDICSWKNEPCDTLGFAPISGMCSKYRSCTINEDTGLGLAFTIAHESGHNFGMIHDGEGNPCRKAEGNIMSPTLTGNNGVFSWSSCSRQYLKKFLSTPQAGCLVDEPKQAGQYKYPDKLPGQIYDADTQCKWQFGAKAKLCSLGFVKDICKSLWCHRVGHRCETKFMPAAEGTVCGLSMWCRQGQCVKFGELGPRPIHGQWSAWSKWSECSRTCGGGVKFQERHCNNPKPQYGGLFCPGSSRIYQLCNINPCNENSLDFRAQQCAEYNSKPFRGWFYQWKPYTKVEEEDRCKLYCKAENFEFFFAMSGKVKDGTPCSPNKNDVCIDGVCELVGCDHELGSKAVSDACGVCKGDNSTCKFYKGLYLNQHKANEYYPVVLIPAGARSIEIQELQVSSSYLAVRSLSQKYYLTGGWSIDWPGEFPFAGTTFEYQRSFNRPERLYAPGPTNETLVFEILMQGKNPGIAWKYALPKVMNGTPPATKRPAYTWSIVQSECSVSCGGGYINVKAICLRDQNTQVNSSFCSAKTKPVTEPKICNAFSCPAYWMPGEWSTCSKACAGGQQSRKIQCVQKKPFQKEEAVLHSLCPVSTPTQVQACNSHACPPQWSLGPWSQCSKTCGRGVRKRELLCKGSAAETLPESQCTSLPRPELQEGCVLGRCPKNSRLQWVASSWSECSATCGLGVRKREMKCSEKGFQGKLITFPERRCRNIKKPNLDLEETCNRRACPAHPVYNMVAGWYSLPWQQCTVTCGGGVQTRSVHCVQQGRPSSSCLLHQKPPVLRACNTNFCPAPEKREDPSCVDFFNWCHLVPQHGVCNHKFYGKQCCKSCTRKI

SEQ ID NO: 11 - protein, 741 aa, Homo sapiens
MDIEDEENMSSSSTDVKENRNLDNVSPKDGSTPGPGEGSQLSNGGGGGPGRKRPLEEGSNGHSKYRLKKRRKTPGPVLPKNALMQLNEIKPGLQYTLLSQTGPVHAPLFVMSVEVNGQVFEGSGPTKKKAKLHAAEKALRSFVQFPNASEAHLAMGRTLSVNTDFTSDQADFPDTLFNGFETPDKAEPPFYVGSNGDDSFSSSGDLSLSASPVPASLAQPPLPVLPPFPPPSGKNPVMILNELRPGLKYDFLSESGESHAKSFVMSVVVDGQFFEGSGRNKKLAKARAAQSALAAIFNLHLDQTPSRQPIPSEGLQLHLPQVLADAVSRLVLGKFGDLTDNFSSPHARRKVLAGVVMTTGTDVKDAKVISVSTGTKCINGEYMSDRGLALNDCHAEIISRRSLLRFLYTQLELYLNNKDDQKRSIFQKSERGGFRLKENVQFHLYISTSPCGDARIFSPHEPILEGSRSYTQAGVQWCNHGSLQPRPPGLLSDPSTSTFQGAGTTEPADRHPNRKARGQLRTKIESGEGTIPVRSNASIQTWDGVLQGERLLTMSCSDKIARWNVVGIQGSLLSIFVEPIYFSSIILGSLYHGDHLSRAMYQRISNIEDLPPLYTLNKPLLSGISNAEARQPGKAPNFSVNWTVGDSAIEVINATTGKDELGRASRLCKHALYCRWMRVHGKVPSHLLRSKITKPNVYHESKLAAKEYQAAKARLFTAFIKAGLGAWVEKPTEQDQFSLTP

SEQ ID NO: 12 - protein, 1261 aa, Homo sapiens
MSGSKSVSPPGYAAQKTAAPAPRGGPEHRSAWGEADSRANGYPHAPGGSARGSTKKPGGAVTPQQQQRLASRWRSDDDDDPPLSGDDPLAGGFGFSFRSKSAWQERGGDDCGRGSRRQRRGAASGGSTRAPPAGGGGGSAAAAASAGGTEVRPRSVEVGLEERRGKGRAADELEAGAVEGGEGSGDGGSSADSGSGAGPGAVLSLGACCLALLQIFRSKKFPSDKLERLYQRYFFRLNQSSLTMLMAVLVLVCLVMLAFHAARPPLQLPYLAVLAAAVGVILIMAVLCNRAAFHQDHMGLACYALIAVVLAVQVVGLLLPQPRSASEGIWWTVFFIYTIYTLLPVRMRAAVLSGVLLSALHLAIALRTNAQDQFLLKQLVSNVLIFSCTNIVGVCTHYPAEVSQRQAFQETRECIQARLHSQRENQQQERLLLSVLPRHVAMEMKADINAKQEDMMFHKIYIQKHDNVSILFADIEGFTSLASQCTAQELVMTLNELFARFDKLAAENHCLRIKILGDCYYCVSGLPEARADHAHCCVEMGMDMIEAISLVREVTGVNVNMRVGIHSGRVHCGVLGLRKWQFDVWSNDVTLANHMEAGGKAGRIHITKATLNYLNGDYEVEPGCGGERNAYLKEHSIETFLILRCTQKRKEEKAMIAKMNRQRTNSIGHNPPHWGAERPFYNHLGGNQVSKEMKRMGFEDPKDKNAQESANPEDEVDEFLGRAIDARSIDRLRSEHVRKFLLTFREPDLEKKYSKQVDDRFGAYVACASLVFLFICFVQITIVPHSIFMLSFYLTCSLLLTLVVFVSVIYSCVKLFPSPLQTLSRKIVRSKMNSTLVGVFTITLVFLAAFVNMFTCNSRDLLGCLAQEHNISASQVNACHVAESAVNYSLGDEQGFCGSPWPNCNFPEYFTYSVLLSLLACSVFLQISCIGKLVLMLAIELIYVLIVEVPGVTLFDNADLLVTANAIDFFNNGTSQCPEHATKVALKVVTPIIISVFVLALYLHAQQVESTARLDFLWKLQATEEKEEMEELQAYNRRLLHNILPKDVAAHFLARERRNDELYYQSCECVAVMFASIANFSEFYVELEANNEGVECLRLLNEIIADFDEIISEDRFRQLEKIKTIGSTYMAASGLNDSTYDKVGKTHIKALADFAMKLMDQMKYINEHSFNNFQMKIGLNIGPVVAGVIGARKPQYDIWGNTVNVASRMDSTGVPDRIQVTTDMYQVLAANTYQLECRGVVKVKGKGEMMTYFLNGGPPLS

SEQ ID NO: 13 - protein, 345 aa, Homo sapiens
MTSVRENILFGMGNPLLDISAVVDKDFLDKYSLKPNDQILAEDKHKELFDELVKKFKVEYHAGGSTQNSIKVAQWMIQQPHKAATFFGCIGIDKFGEILKRKAAEAHVDAHYYEQNEQPTGTCAACITGDNRSLIANLAAANCYKKEKHLDLEKNWMLVEKARVCYIAGFFLTVSPESVLKVAHHASENNRIFTLNLSAPFISQFYKESLMKVMPYVDILFGNETEAATFAREQGFETKDIKEIAKKTQALPKMNSKRQRIVIFTQGRDDTIMATESEVTAFAVLDQDQKEIIDTNGAGDAFVGGFLSQLVSDKPLTECIRAGHYAASIIIRRTGCTFPEKPDFH

SEQ ID NO: 14 - protein, 1102 aa, Homo sapiens
MFQLPVNNLGSLRKARKTVKKILSDIGLEYCKEHIEDFKQFEPNDFYLKNTTWEDVGLWDPSLTKNQDYRTKPFCCSACPFSSKFFSAYKSHFRNVHSEDFENRILLNCPYCTFNADKKTLETHIKIFHAPNASAPSSSLSTFKDKNKNDGLKPKQADSVEQAVYYCKKCTYRDPLYEIVRKHIYREHFQHVAAPYIAKAGEKSLNGAVPLGSNAREESSIHCKRCLFMPKSYEALVQHVIEDHERIGYQVTAMIGHTNVVVPRSKPLMLIAPKPQDKKSMGLPPRIGSLASGNVRSLPSQQMVNRLSIPKPNLNSTGVNMMSSVHLQQNNYGVKSVGQGYSVGQSMRLGLGGNAPVSIPQQSQSVKQLLPSGNGRSYGLGSEQRSQAPARYSLQSANASSLSSGQLKSPSLSQSQASRVLGQSSSKPAAAATGPPPGNTSSTQKWKICTICNELFPENVYSVHFEKEHKAEKVPAVANYIMKIHNFTSKCLYCNRYLPTDTLLNHMLIHGLSCPYCRSTFNDVEKMAAHMRMVHIDEEMGPKTDSTLSFDLTLQQGSHTNIHLLVTTYNLRDAPAESVAYHAQNNPPVPPKPQPKVQEKADIPVKSSPQAAVPYKKDVGKTLCPLCFSILKGPISDALAHHLRERHQVIQTVHPVEKKLTYKCIHCLGVYTSNMTASTITLHLVHCRGVGKTQNGQDKTNAPSRLNQSPSLAPVKRTYEQMEFPLLKKRKLDDDSDSPSFFEEKPEEPVVLALDPKGHEDDSYEARKSFLTKYFNKQPYPTRREIEKLAASLWLWKSDIASHFSNKRKKCVRDCEKYKPGVLLGFNMKELNKVKHEMDFDAEWLFENHDEKDSRVNASKTADKKLNLGKEDDSSSDSFENLEEESNESGSPFDPVFEVEPKISNDNPEEHVLKVIPEDASESEEKLDQKEDGSKYETIHLTEEPTKLMHNASDSEVDQDDVVEWKDGASPSESGPGSQQVSDFEDNTCEMKPGTWSDESSQSEDARSSKPAAKKKATMQGDREQLKWKNSSYGKVEGFWSKDQSQWKNASENDERLSNPQIEWQNSTIDSEDGEQFDNMTDGVAEPMHGSLAGVKLSSQQA

SEQ ID NO: 15 - protein, 412 aa, Homo sapiens
MPIMGSSVYITVELAIAVLAILGNVLVCWAVWLNSNLQNVTNYFVVSLAAADIAVGVLAIPFAITISTGFCAACHGCLFIACFVLVLTQSSIFSLLAIAIDRYIAIRIPLRYNGLVTGTRAKGIIAICWVLSFAIGLTPMLGWNNCGQPKEGKNHSQGCGEGQVACLFEDVVPMNYMVYFNFFACVLVPLLLMLGVYLRIFLAARRQLKQMESQPLPGERARSTLQKEVHAAKSLAIIVGLFALCWLPLHIINCFTFFCPDCSHAPLWLMYLAIVLSHTNSVVNPFIYAYRIREFRQTFRKIIRSHVLRQQEPFKAAGTSARVLAAHGSDGEQVSLRLNGHPPGVWANGSAPHPERRPNGYALGLVSGGSAQESQGNTGLPDVELLSHELKGVCPEPPGLDDPLAQDGAGVS

SEQ ID NO: 16 - protein, 347 aa, Homo sapiens
MPNNSTALSLANVTYITMEIFIGLCAIVGNVLVICVVKLNPSLQTTTFYFIVSLALADIAVGVLVMPLAIVVSLGITIHFYSCLFMTCLLLIFTHASIMSLLAIAVDRYLRVKLTVRFRIPGLPGCILSFQLKVCFLPVMWLFILLSLALISDAMVMDEKVKRSFVLDTASAICNYNAHYKNHPKYWCRGYFRDYCNIIAFSPNSTNHVALRDTGNQLIVTMSCLTKEDTGWYWCGIQRDFARDDMDFTELIVTDDKGTLANDFWSGKDLSGNKTRSCKAPKVVRKADRSRTSILIICILITGLGIISVISHLTKRRRSQRNRRVGNTLKPFSRVLTPKEMAPTEQM

SEQ ID NO: 17 - protein, 413 aa, Homo sapiens
MGQPGNGSAFLLAPNRSHAPDHDVTQQRDEVWVVGMGIVMSLIVLAIVFGNVLVITAIAKFERLQTVTNYFITSLACADLVMGLAVVPFGAAHILMKMWTFGNFWCEFWTSIDVLCVTASIETLCVIAVDRYFAITSPFKYQSLLTKNKARVIILMVWIVSGLTSFLPIQMHWYRATHQEAINCYANETCCDFFTNQAYAIASSIVSFYVPLVIMVFVYSRVFQEAKRQLQKIDKSEGRFHVQNLSQVEQDGRTGHGLRRSSKFCLKEHKALKTLGIIMGTFTLCWLPFFIVNIVHVIQDNLIRKEVYILLNWIGYVNSGFNPLIYCRSPDFRIAFQELLCLRRSSLKAYGNGYSSNGNTGEQSGYHVEQEKENKLLCEDLPGTEDFVGHQGTVPSDNIDSQGRNCSTNDSLL

SEQ ID NO: 18 - protein, 484 aa, Homo sapiens
MAAGGDHGSPDSYRSPLASRYASPEMCFVFSDRYKFRTWRQLWLWLAEAEQTLGLPITDEQIQEMKSNLENIDFKMAAEEEKRLRHDVMAHVHTFGHCCPKAAGIIHLGATSCYVGDNTDLIILRNALDLLLPKLARVISRLADFAKERASLPTLGFTHFQPAQLTTVGKRCCLWIQDLCMDLQNLKRVRDDLRFRGVKGTTGTQASFLQLFEGDDHKVEQLDKMVTEKAGFKRAFIITGQTYTRKVDIEVLSVLASLGASVHKICTDIRLLANLKEMEEPFEKQQIGSSAMPYKRNPMRSERCCSLARHLMTLVMDPLQTASVQWFERTLDDSANRRICLAEAFLTADTILNTLQNISEGLVVYPKVIERRIRQELPFMATENIIMAMVKAGGSRQDCHEKIRVLSQQAASVVKQEGGDNDLIERIQVDAYFSPIHSQLDHLLDPSSFTGRASQQVQRFLEEEVYPLLKPYESVMKVKAELCL

SEQ ID NO: 19 - protein, 1311 aa, Homo sapiens
MDLFDFFRDWDLEQQCHYEQDRSALKKREWERRNQEVQQEDDLFSSGFDLFGEPYKVAEYTNKGDALANRVQNTLGNYDEMKNLLTNHSNQNHLVGIPKNSVPQNPNNKNEPSFFPEQKNRIIPPHQDNTHPSAPMPPPSVVILNSTLIHSNRKSKPEWSRDSHNPSTVLASQASGQPNKMQTLTQDQSQAKLEDFFVYPAEQPQIGEVEESNPSAKEDSNPNSSGEDAFKEIFQSNSPEESEFAVQAPGSPLVASSLLAPSSGLSVQNFPPGLYCKTSMGQQKPTAYVRPMDGQDQAPDISPTLKPSIEFENSFGNLSFGTLLDGKPSAASSKTKLPKFTILQTSEVSLPSDPSCVEEILREMTHSWPTPLTSMHTAGHSEQSTFSIPGQESQHLTPGFTLQKWNDPTTRASTKSVSFKSMLEDDLKLSSDEDDLEPVKTLTTQCTATELYQAVEKAKPRNNPVNPPLATPQPPPAVQASGGSGSSSESESSSESDSDTESSTTDSESNEAPRVATPEPEPPSTNKWQLDKWLNKVTSQNKSFICGQNETPMETISLPPPIIQPMEVQMKVKTNASQVPAEPKERPLLSLIREKARPRPTQKIPETKALKHKLSTTSETVSQRTIGKKQPKKVEKNTSTDEFTWPKPNITSSTPKEKESVELHDPPRGRNKATAHKPAPRKEPRPNIPLAPEKKKYRGPGKIVPKSREFIETDSSTSDSNTDQEETLQIKVLPPCIISGGNTAKSKEICGASLTLSTLMSSSGSNNNLSISNEEPTFSPIPVMQTEILSPLRDHENLKNLWVKIDLDLLSRVPGHSSLHAAPAKPDHKETATKPKRQTAVTAVEKPAPKGKRKHKPIEVAEKIPEKKQRLEEATTICLLPPCISPAPPHKPPNTRENNSSRRANRRKEEKLFPPPLSPLPEDPPRRRNVSGNNGPFGQDKNIAMTGQITSTKPKRTEGKFCATFKGISVNEGDTPKKASSATITVTNTAIATATVTATAIVTTTVTATATATATTTTTTTTISTITSTITTGLMDSSHLEMTSWAALPLLSSSSTNVRRPKLTFDDSVHNADYYMQEAKKLKHKADALFEKFGKAVNYADAALSFTECGNAMERDPLEAKSPYTMYSETVELLRYAMRLKNFASPLASDGDKKLAVLCYRCLSLLYLRMFKLKKDHAMKYSRSLMEYFKQNASKVAQIPSPWVSNGKNTPSPVSLNNVSPINAMGNCNNGPVTIPQRIHHMAASHVNITSNVLRGYEHWDMADKLTRENKEFFGDLDTLMGPLTQHSSMTNLVRYVRQGLCWLRIDAHLL

SEQ ID NO: 20 - protein, 1163 aa, Homo sapiens
MNREDRNVLRMKERERRNQEIQQGEDAFPPSSPLFAEPYKVTSKEDKLSSRIQSMLGNYDEMKDFIGDRSIPKLVAIPKPTVPPSADEKSNPNFFEQRHGGSHQSSKWTPVGPAPSTSQSQKRSSGLQSGHSSQRTSAGSSSGTNSSGQRHDRESYNNSGSSSRKKGQHGSEHSKSRSSSPGKPQAVSSLNSSHSRSHGNDHHSKEHQRSKSPRDPDANWDSPSRVPFSSGQHSTQSFPPSLMSKSNSMLQKPTAYVRPMDGQESMEPKLSSEHYSSQSHGNSMTELKPSSKAHLTKLKIPSQPLDASASGDVSCVDEILKEMTHSWPPPLTAIHTPCKTEPSKFPFPTKESQQSNFGTGEQKRYNPSKTSNGHQSKSMLKDDLKLSSSEDSDGEQDCDKTMPRSTPGSNSEPSHHNSEGADNSRDDSSSHSGSESSSGSDSESESSSSDSEANEPSQSASPEPEPPPTNKWQLDNWLNKVNPHKVSPASSVDSNIPSSQGYKKEGREQGTGNSYTDTSGPKETSSATPGRDSKTIQKGSESGRGRQKSPAQSDSTTQRRTVGKKQPKKAEKAAAEEPRGGLKIESETPVDLASSMPSSRHKAATKGSRKPNIKKESKSSPRPTAEKKKYKSTSKSSQKSREIIETDTSSSDSDESESLPPSSQTPKYPESNRTPVKPSSVEEEDSFFRQRMFSPMEEKELLSPLSEPDDRYPLIVKIDLNLLTRIPGKPYKETEPPKGEKKNVPEKHTREAQKQASEKVSNKGKRKHKNEDDNRASESKKPKTEDKNSAGHKPSSNRESSKQSAAKEKDLLPSPAGPVPSKDPKTEHGSRKRTISQSSSLKSSSNSNKETSGSSKNSSSTSKQKKTEGKTSSSSKEVKEKAPSSSSNCPPSAPTLDSSKPRRTKLVFDDRNYSADHYLQEAKKLKHNADALSDRFEKAVYYLDAVVSFIECGNALEKNAQESKSPFPMYSETVDLIKYTMKLKNYLAPDATAADKRLTVLCLRCESLLYLRLFKLKKENALKYSKTLTEHLKNSYNNSQAPSPGLGSKAVGMPSPVSPKLSPGNSGNYSSGASSASASGSSVTIPQKIHQMAASYVQVTSNFLYATEIWDQAEQLSKEQKEFFAELDKVMGPLIFNASIMTDLVRYTRQGLHWLRQDAKLIS

SEQ ID NO: 21 - protein, 857 aa, Homo sapiens
MNYQQQLANSAAIRAEIQRFESVHPNIYSIYELLERVEEPVLQNQIREHVIAIEDAFVNSQEWTLSRSVPELKVGIVGNLASGKSALVHRYLTGTYVQEESPEGGRFKKEIVVDGQSYLLLIRDEGGPPEAQFAMWVDAVIFVFSLEDEISFQTVYHYYSRMANYRNTSEIPLVLVGTQDAISSANPRVIDDARARKLSNDLKRCTYYETCATYGLNVERVFQDVAQKIVATRKKQQLSIGPCKSLPNSPSHSSVCSAQVSAVHISQTSNGGGSLSDYSSSVPSTPSTSQKELRIDVPPTANTPTPVRKQSKRRSNLFTSRKGSDPDKEKKGLESRADSIGSGRAIPIKQGMLLKRSGKSLNKEWKKKYVTLCDNGVLTYHPSLHDYMQNVHGKEIDLLRTTVKVPGKRPPRATSACAPISSPKTNGLSKDMSSLHISPNSGNVTSASGSQMASGISLVSFNSRPDGMHQRSYSVSSADQWSEATVIANSAISSDTGLGDSVCSSPSISSTTSPKLDPPPSPHANRKKHRRKKSTSNFKADGLSGTAEEQEENFEFIIVSLTGQTWHFEATTYEERDAWVQAIESQILASLQSCESSKNKSRLTSQSEAMALQSIRNMRGNSHCVDCETQNPNWASLNLGALMCIECSGIHRNLGTHLSRVRSLDLDDWPVELIKVMSSIGNELANSVWEESSQGRTKPSVDSTREEKERWIRAKYEQKLFLAPLPCTELSLGQHLLRATADEDLRTAILLLAHGSRDEVNETCGEGDGRTALHLACRKGNVVLAQLLIWYGVDVTARDAHGNTALAYARQASSQECIDVLLQYGCPDERFVLMATPNLSRRNNNRNNSSGRVPTII

SEQ ID NO: 22 - protein, 503 aa, Homo sapiens
MAEGSQSAPEAGNDMGNDDAIGGNVSKYIVLPTGYCGQPKKGHLIFDACFESGNLGRVDQVSEFEYDLFIRPDTCNPRFRVWFNFTVENVKESQRVIFNIVNFSKTKSLYRDGMAPMVKSTSRPKWQRLPPKNVYYYRCPDHRKNYVMSFAFCFDREEDIYQFAYCYPYTYTRFQHYLDSLQKRNMDYFFREQLGQSVQQRKLDLLTITSPDNLREGAEQKVVFITGRVHPGETPSSFVCQGIIDFLVSQHPIACVLREYLVFKIAPMLNPDGVYLGNYRCSLMGFDLNRHWLDPSPWVHPTLHGVKQLIVQMYNDPKTSLEFYIDIHAHSTMMNGFMYGNIFEDEERFQRQAIFPKLLCQNAEDFSYSSTSFNRDAVKAGTGRRFLGGLLDHTSYCYTLEVSFYSYIISGTTAAVPYTEEAYMKLGRNVARTFLDYYRLNPVVEKVAIPMPRLRNKEIEVQRRKEKSPPYKHPLLRGPASNYPNSKGDKKSSVNHKDPSTPF

SEQ ID NO: 23 - protein, 445 aa, Homo sapiens
MKNPEAQQDVSVSQGFRMLFYTMKPSETSFQTLEEVPDYVKKATPFFISLMLLELVVSWILKGKPPGRLDDALTSISAGVLSRLPSLFFRSIELTSYIYIWENYRLFNLPWDSPWTWYSAFLGVDFGYYWFHRMAHEVNIMWAGHQTHHSSEDYNLSTALRQSVLQIYTSWIFYSPLALFIPPSVYAVHLQFNLLYQFWIHTEVINNLGPLELILNTPSHHRVHHGRNRYCIDKNYAGVLIIWDKIFGTFEAENEKVVYGLTHPINTFEPIKVQFHHLFSIWTTFWATPGFFNKFSVIFKGPGWGPGKPRLGLSEEIPEVTGKEVPFSSSSSQLLKIYTVVQFALMLAFYEETFADTAALSQVTLLLRVCFIILTLTSIGFLLDQRPKAAIMETLRCLMFLMLYRFGHLKPLVPSLSSAFEIVFSICIAFWGVRSMKQLTSHPWK

SEQ ID NO: 24 - protein, 363 aa, Homo sapiens
MKGNSTLATTSKNITSGLHFGLVNISGNNESTLNCSQKPSDKHLDAIPILYYIIFVIGFLVNIVVVTLFCCQKGPKKVSSIYIFNLAVADLLLLATLPLWATYYSYRYDWLFGPVMCKVFGSFLTLNMFASIFFITCMSVDRYQSVIYPFLSQRRNPWQASYIVPLVWCMACLSSLPTFYFRDVRTIEYLGVNACIMAFPPEKYAQWSAGIALMKNILGFIIPLIFIATCYFGIRKHLLKTNSYGKNRITRDQVLKMAAAVVLAFIICWLPFHVLTFLDALAWMGVINSCEVIAVIDLALPFAILLGFTNSCVNPFLYCFVGNRFQQKLRSVFRVPITWLQGKRESMSCRKSSSLREMETFVS

SEQ ID NO: 25 - protein, 1603 aa, Homo sapiens
MRVKPQGLVVTSSAVCSSPDYLREPKYYPGGPPTPRPLLPTRPPASPPDKAFSTHAFSENPRPPPRRDPSTRRPPVLAKGDDPLPPRAARPVSQARCPTPVGDGSSSRRCWDNGRVNLRPVVQLIDIMKDLTRLSQDLQHSGVHLDCGGLRLSRPPAPPPGDLQYSFFSSPSLANSIRSPEERATPHAKSERPSHPLYEPEPEPRDSPQPGQGHSPGATAAATGLPPEPEPDSTDYSELADADILSELASLTCPEAQLLEAQALEPPSPEPEPQLLDPQPRFLDPQALEPLGEALELPPLQPLADPLGLPGLALQALDTLPDSLESQLLDPQALDPLPKLLDVPGRRLEPQQPLGHCPLAEPLRLDLCSPHGPPGPEGHPKYALRRTDRPKILCRRRKAGRGRKADAGPEGRLLPLPMPTGLVAALAEPPPPPPPPPPALPGPGPVSVPELKPESSQTPVVSTRKGKCRGVRRMVVKMAKIPVSLGRRNKTTYKVSSLSSSLSVEGKELGLRVSAEPTPLLKMKNNGRNVVVVFPPGEMPIILKRKRGRPPKNLLLGPGKPKEPAVVAAEAATVAAATMAMPEVKKRRRRKQKLASPQPSYAADANDSKAEYSDVLAKLAFLNRQSQCAGRCSPPRCWTPSEPESVHQAPDTQSISHFLHRVQGFRRRGGKAGGFGGRGGGHAAKSARCSFSDFFEGIGKKKKVVAVAAAGVGGPGLTELGHPRKRGRGEVDAVTGKPKRKRRSRKNGTLFPEQVPSGPGFGEAGAEWAGDKGGGWAPHHGHPGGQAGRNCGFQGTEARAFASTGLESGASGRGSYYSTGAPSGQTELSQERQNLFTGYFRSLLDSDDSSDLLDFALSASRPESRKASGTYAGPPTSALPAQRGLATFPSRGAKASPVAVGSSGAGADPSFQPVLSARQTFPPGRAASYGLTPAASDCRAAETFPKLVPPPSAMARSPTTHPPANTYLPQYGGYGAGQSVFAPTKPFTGQDCANSKDCSFAYGSGNSLPASPSSAHSAGYAPPPTGGPCLPPSKASFFSSSEGAPFSGSAPTPLRCDSRASTVSPGGYMVPKGTTASATSAASAASSSSSSFQPSPENCRQFAGASQWPFRQGYGGLDWASEAFSQLYNPSFDCHVSEPNVILDISNYTPQKVKQQTAVSETFSESSSDSTQFNQPVGGGGFRRANSEASSSEGQSSLSSLEKLMMDWNEASSAPGYNWNQSVLFQSSSKPGRGRRKKVDLFEASHLGFPTSASAAASGYPSKRSTGPRQPRGGRGGGACSAKKERGGAAAKAKFIPKPQPVNPLFQDSPDLGLDYYSGDSSMSPLPSQSRAFGVGERDPCDFIGPYSMNPSTPSDGTFGQGFHCDSPSLGAPELDGKHFPPLAHPPTVFDAGLQKAYSPTCSPTLGFKEELRPPPTKLAACEPLKHGLQGASLGHAAAAQAHLSCRDLPLGQPHYDSPSCKGTAYWYPPGSAARSPPYEGKVGTGLLADFLGRTEAACLSAPHLASPPATPKADKEPLEMARPPGPPRGPAAAAAGYGCPLLSDLTLSPVPRDSLLPLQDTAYRYPGFMPQAHPGLGGGPKSGFLGPMAEPHPEDTFTVTSL

SEQ ID NO: 26 - protein, 1196 aa, Homo sapiens
MPTAESEAKVKTKVRFEELLKTHSDLMREKKKLKKKLVRSEENISPDTIRSNLHYMKETTSDDPDTIRSNLPHIKETTSDDVSAANTNNLKKSTRVTKNKLRNTQLATENPNGDASVEEDKQGKPNKKVIKTVPQLTTQDLKPETPENKVDSTHQKTHTKPQPGVDHQKSEKANEGREETDLEEDEELMQAYQCHVTEEMAKEIKRKIRKKLKEQLTYFPSDTLFHDDKLSSEKRKKKKEVPVFSKAETSTLTISGDTVEGEQKKESSVRSVSSDSHQDDEISSMEQSTEDSMQDDTKPKPKKTKKKTKAVADNNEDVDGDGVHEITSRDSPVYPKCLLDDDLVLGVYIHRTDRLKSDFMISHPMVKIHVVDEHTGQYVKKDDSGRPVSSYYEKENVDYILPIMTQPYDFKQLKSRLPEWEEQIVFNENFPYLLRGSDESPKVILFFEILDFLSVDEIKNNSEVQNQECGFRKIAWAFLKLLGANGNANINSKLRLQLYYPPTKPRSPLSVVEAFEWWSKCPRNHYPSTLYVTVRGLKVPDCIKPSYRSMMALQEEKGKPVHCERHHESSSVDTEPGLEESKEVIKWKRLPGQACRIPNKHLFSLNAGERGCFCLDFSHNGRILAAACASRDGYPIILYEIPSGRFMRELCGHLNIIYDLSWSKDDHYILTSSSDGTARIWKNEINNTNTFRVLPHPSFVYTAKFHPAVRELVVTGCYDSMIRIWKVEMREDSAILVRQFDVHKSFINSLCFDTEGHHMYSGDCTGVIVVWNTYVKINDLEHSVHHWTINKEIKETEFKGIPISYLEIHPNGKRLLIHTKDSTLRIMDLRILVARKFVGAANYREKIHSTLTPCGTFLFAGSEDGIVYVWNPETGEQVAMYSDLPFKSPIRDISYHPFENMVAFCAFGQNEPILLYIYDFHVAQQEAEMFKRYNGTFPLPGIHQSQDALCTCPKLPHQGSFQIDEFVHTESSSTKMQLVKQRLETVTEVIRSCAAKVNKNLSFTSPPAVSSQQSKLKQSNMLTAQEILHQFGFTQTGIISIERKPCNHQVDTAPTVVALYDYTANRSDELTIHRGDIIRVFFKDNEDWWYGSIGKGQEGYFPANHVASETLYQELPPEIKERSPPLSPEEKTKIEKSPAPQKQSINKNKSQDFRLGSESMTHSEMRKEQSHEDQGHIMDTRMRKNKQAGRKVTLIE

SEQ ID NO: 27 - protein, 3907 aa, Homo sapiens
MEDEERQKKLEAGKAKLAQFRQRKAQSDGQSPSKKQKKKRKTSSSKHDVSAHHDLNIDQSQCNEMYINSSQRVESTVIPESTIMRTLHSGEITSHEQGFSVELESEISTTADDCSSEVNGCSFVMRTGKPTNLLREEEFGVDDSYSEQGAQDSPTHLEMMESELAGKQHEIEELNRELEEMRVTYGTEGLQQLQEFEAAIKQRDGIITQLTANLQQARREKDETMREFLELTEQSQKLQIQFQQLQASETLRNSTHSSTAADLLQAKQQILTHQQQLEEQDHLLEDYQKKKEDFTMQISFLQEKIKVYEMEQDKKVENSNKEEIQEKETIIEELNTKIIEEEKKTLELKDKLTTADKLLGELQEQIVQKNQEIKNMKLELTNSKQKERQSSEEIKQLMGTVEELQKRNHKDSQFETDIVQRMEQETQRKLEQLRAELDEMYGQQIVQMKQELIRQHMAQMEEMKTRHKGEMENALRSYSNITVNEDQIKLMNVAINELNIKLQDTNSQKEKLKEELGLILEEKCALQRQLEDLVEELSFSREQIQRARQTIAEQESKLNEAHKSLSTVEDLKAEIVSASESRKELELKHEAEVTNYKIKLEMLEKEKNAVLDRMAESQEAELERLRTQLLFSHEEELSKLKEDLEIEHRINIEKLKDNLGIHYKQQIDGLQNEMSQKIETMQFEKDNLITKQNQLILEISKLKDLQQSLVNSKSEEMTLQINELQKEIEILRQEEKEKGTLEQEVQELQLKTELLEKQMKEKENDLQEKFAQLEAENSILKDEKKTLEDMLKIHTPVSQEERLIFLDSIKSKSKDSVWEKEIEILIEENEDLKQQCIQLNEEIEKQRNTFSFAEKNFEVNYQELQEEYACLLKVKDDLEDSKNKQELEYKSKLKALNEELHLQRINPTTVKMKSSVFDEDKTFVAETLEMGEVVEKDTTELMEKLEVTKREKLELSQRLSDLSEQLKQKHGEISFLNEEVKSLKQEKEQVSLRCRELEIIINHNRAENVQSCDTQVSSLLDGVVTMTSRGAEGSVSKVNKSFGEESKIMVEDKVSFENMTVGEESKQEQLILDHLPSVTKESSLRATQPSENDKLQKELNVLKSEQNDLRLQMEAQRICLSLVYSTHVDQVREYMENEKDKALCSLKEELIFAQEEKIKELQKIHQLELQTMKTQETGDEGKPLHLLIGKLQKAVSEECSYFLQTLCSVLGEYYTPALKCEVNAEDKENSGDYISENEDPELQDYRYEVQDFQENMHTLLNKVTEEYNKLLVLQTRLSKIWGQQTDGMKLEFGEENLPKEETEFLSIHSQMTNLEDIDVNHKSKLSSLQDLEKTKLEEQVQELESLISSLQQQLKETEQNYEAEIHCLQKRLQAVSESTVPPSLPVDSVVITESDAQRTMYPGSCVKKNIDGTIEFSGEFGVKEETNIVKLLEKQYQEQLEEEVAKVIVSMSIAFAQQTELSRISGGKENTASSKQAHAVCQQEQHYFNEMKLSQDQIGFQTFETVDVKFKEEFKPLSKELGEHGKEILLSNSDPHDIPESKDCVLTISEEMFSKDKTFIVRQSIHDEISVSSMDASRQLMLNEEQLEDMRQELVRQYQEHQQATELLRQAHMRQMERQREDQEQLQEEIKRLNRQLAQRSSIDNENLVSERERVLLEELEALKQLSLAGREKLCCELRNSSTQTQNGNENQGEVEEQTFKEKELDRKPEDVPPEILSNERYALQKANNRLLKILLEVVKTTAAVEETIGRHVLGILDRSSKSQSSASLIWRSEAEASVKSCVHEEHTRVTDESIPSYSGSDMPRNDINMWSKVTEEGTELSQRLVRSGFAGTEIDPENEELMLNISSRLQAAVEKLLEAISETSSQLEHAKVTQTELMRESFRQKQEATESLKCQEELRERLHEESRAREQLAVELSKAEGVIDGYADEKTLFERQIQEKTDIIDRLEQELLCASNRLQELEAEQQQIQEERELLSRQKEAMKAEAGPVEQQLLQETEKLMKEKLEVQCQAEKVRDDLQKQVKALEIDVEEQVSRFIELEQEKNTELMDLRQQNQALEKQLEKMRKFLDEQAIDREHERDVFQQEIQKLEQQLKVVPRFQPISEHQTREVEQLANHLKEKTDKCSELLLSKEQLQRDIQERNEEIEKLEFRVRELEQALLVSADTFQKVEDRKHFGAVEAKPELSLEVQLQAERDAIDRKEKEITNLEEQLEQFREELENKNEEVQQLHMQLEIQKKESTTRLQELEQENKLFKDDMEKLGLAIKESDAMSTQDQHVLFGKFAQIIQEKEVEIDQLNEQVTKLQQQLKITTDNKVIEEKNELIRDLETQIECLMSDQECVKRNREEEIEQLNEVIEKLQQELANIGQKTSMNAHSLSEEADSLKHQLDVVIAEKLALEQQVETANEEMTFMKNVLKETNFKMNQLTQELFSLKRERESVEKIQSIPENSVNVAIDHLSKDKPELEVVLTEDALKSLENQTYFKSFEENGKGSIINLETRLLQLESTVSAKDLELTQCYKQIKDMQEQGQFETEMLQKKIVNLQKIVEEKVAAALVSQIQLEAVQEYAKFCQDNQTISSEPERTNIQNLNQLREDELGSDISALTLRISELESQVVEMHTSLILEKEQVEIAEKNVLEKEKKLLELQKLLEGNEKKQREKEKKRSPQDVEVLKTTTELFHSNEESGFFNELEALRAESVATKAELASYKEKAEKLQEELLVKETNMTSLQKDLSQVRDHLAEAKEKLSILEKEDETEVQESKKACMFEPLPIKLSKSIASQTDGTLKISSSNQTPQILVKNAGIQINLQSECSSEEVTEIISQFTEKIEKMQELHAAEILDMESRHISETETLKREHYVAVQLLKEECGTLKAVIQCLRSKEGSSIPELAHSDAYQTREICSSDSGSDWGQGIYLTHSQGFDIASEGRGEESESATDSFPKKIKGLLRAVHNEGMQVLSLTESPYSDGEDHSIQQVSEPWLEERKAYINTISSLKDLITKMQLQREAEVYDSSQSHESFSDWRGELLLALQQVFLEERSVLLAAFRTELTALGTTDAVGLLNCLEQRIQEQGVEYQAAMECLQKADRRSLLSEIQALHAQMNGRKITLKREQESEKPSQELLEYNIQQKQSQMLEMQVELSSMKDRATELQEQLSSEKMVVAELKSELAQTKLELETTLKAQHKHLKELEAFRLEVKDKTDEVHLLNDTLASEQKKSRELQWALEKEKAKLGRSEERDKEELEDLKFSLESQKQRNLQLNLLLEQQKQLLNESQQKIESQRMLYDAQLSEEQGRNLELQVLLESEKVRIREMSSTLDRERELHAQLQSSDGTGQSRPPLPSEDLLKELQKQLEEKHSRIVELLNETEKYKLDSLQTRQQMEKDRQVHRKTLQTEQEANTEGQKKMHELQSKVEDLQRQLEEKRQQVYKLDLEGQRLQGIMQEFQKQELEREEKRESRRILYQNLNEPTTWSLTSDRTRNWVLQQKIEGETKESNYAKLIEMNGGGTGCNHELEMIRQKLQCVASKLQVLPQKASERLQFETADDEDFIWVQENIDEIILQLQKLTGQQGEEPSLVSPSTSCGSLTERLLRQNAELTGHISQLTEEKNDLRNMVMKLEEQIRWYRQTGAGRDNSSRFSLNGGANIEAIIASEKEVWNREKLTLQKSLKRAEAEVYKLKAELRNDSLLQTLSPDSEHVTLKRIYGKYLRAESFRKALIYQKKYLLLLLGGFQECEDATLALLARMGGQPAFTDLEVITNRPKGFTRFRSAVRVSIAISRMKFLVRRWHRVTGSVSININRDGFGLNQGAEKTDSFYHSSGGLELYGEPRHTTYRSRSDLDYIRSPLPFQNRYPGTPADFNPGSLACSQLQNYDPDRALTDYITRLEALQRRLGTIQSGSTTQFHAGMRR

SEQ ID NO: 28 - protein, 512 aa, Homo sapiens
MATANGAVENGQPDRKPPALPRPIRNLEVKFTKIFINNEWHESKSGKKFATCNPSTREQICEVEEGDKPDVDKAVEAAQVAFQRGSPWRRLDALSRGRLLHQLADLVERDRATLAALETMDTGKPFLHAFFIDLEGCIRTLRYFAGWADKIQGKTIPTDDNVVCFTRHEPIGVCGAITPWNFPLLMLVWKLAPALCCGNTMVLKPAEQTPLTALYLGSLIKEAGFPPGVVNIVPGFGPTVGAAISSHPQINKIAFTGSTEVGKLVKEAASRSNLKRVTLELGGKNPCIVCADADLDLAVECAHQGVFFNQGQCCTAASRVFVEEQVYSEFVRRSVEYAKKRPVGDPFDVKTEQGPQIDQKQFDKILELIESGKKEGAKLECGGSAMEDKGLFIKPTVFSEVTDNMRIAKEEIFGPVQPILKFKSIEEVIKRANSTDYGLTAAVFTKNLDKALKLASALESGTVWINCYNALYAQAPFGGFKMSGNGRELGEYALAEYTEVKTVTIKLGDKNP

SEQ ID NO: 29 - protein, 548 aa, Homo sapiens
MATCIWLRSCGARRLGSTFPGCRLRPRAGGLVPASGPAPGPAQLRCYAGRLAGLSAALLRTDSFVGGRWLPAAATFPVQDPASGAALGMVADCGVREARAAVRAAYEAFCRWREVSAKERSSLLRKWYNLMIQNKDDLARIITAESGKPLKEAHGEILYSAFFLEWFSEEARRVYGDIIHTPAKDRRALVLKQPIGVAAVITPWNFPSAMITRKVGAALAAGCTVVVKPAEDTPFSALALAEVNQGFLLDLDPLLLASQAGIPSGVYNVIPCSRKNAKEVGEAICTDPLVSKISFTGSTTTGKILLHHAANSVKRVSMELGGLAPFIVFDSANVDQAVAGAMASKFRNTGQTCVCSNQFLVQRGIHDAFVKAFAEAMKKNLRVGNGFEEGTTQGPLINEKAVEKVEKQVNDAVSKGATVVTGGKRHQLGKNFFEPTLLCNVTQDMLCTHEETFGPLAPVIKFDTEEEAIAIANAADVGLAGYFYSQDPAQIWRVAEQLEVGMVGVNEGLISSVECPFGGVKQSGLGREGSKYGIDEYLELKYVCYGGL

SEQ ID NO: 30 - protein, 507 aa, Homo sapiens
MEKWYLMTVVVLIGLTVRWTVSLNSYSGAGKPPMFGDYEAQRHWQEITFNLPVKQWYFNSSDNNLQYWGLDYPPLTAYHSLLCAYVAKFINPDWIALHTSRGYESQAHKLFMRTTVLIADLLIYIPAVVLYCCCLKEISTKKKIANALCILLYPGLILIDYGHFQYNSVSLGFALWGVLGISCDCDLLGSLAFCLAINYKQMELYHALPFFCFLLGKCFKKGLKGKGFVLLVKLACIVVASFVLCWLPFFTEREQTLQVLRRLFPVDRGLFEDKVANIWCSFNVFLKIKDILPRHIQLIMSFCSTFLSLLPACIKLILQPSSKGFKFTLVSCALSFFLFSFQVHEKSILLVSLPVCLVLSEIPFMSTWFLLVSTFSMLPLLLKDELLMPSVVTTMAFFIACVTSFSIFEKTSEEELQLKSFSISVRKYLPCFTFLSRIIQYLFLISVITMVLLTLMTVTLDPPQKLPDLFSVLVCFVSCLNFLFFLVYFNIIIMWDSKSGRNQKKIS

SEQ ID NO: 31 - protein, 218 aa, Homo sapiens
MLTFNHDAPWHTQKTLKTSEFGKSFGTLGHIGNISHQCWAGCAAGGRAVLSGEPEANMDQETVGNVVLLAIVTLISVVQNGFFAHKVEHESRTQNGRSFQRTGTLAFERVYTANQNCVDAYPTFLAVLWSAGLLCSQVPAAFAGLMYLFVRQKYFVGYLGERTQSTPGYIFGKRIILFLFLMSVAGIFNYYLIFFFGSDFENYIKTISTTISPLLLIP

SEQ ID NO: 32 - protein, 780 aa, Homo sapiens
MNVRIFYSVSQSPHSLLSLLFYCAILESRISATMPLFKLPAEEKQIDDAMRNFAEKVFASEVKDEGGRQEISPFDVDEICPISHHEMQAHIFHLETLSTSTEARRKKRFQGRKTVNLSIPLSETSSTKLSHIDEYISSSPTYQTVPDFQRVQITGDYASGVTVEDFEIVCKGLYRALCIREKYMQKSFQRFPKTPSKYLRNIDGEAWVANESFYPVFTPPVKKGEDPFRTDNLPENLGYHLKMKDGVVYVYPNEAAVSKDEPKPLPYPNLDTFLDDMNFLLALIAQGPVKTYTHRRLKFLSSKFQVHQMLNEMDELKELKNNPHRDFYNCRKVDTHIHAAACMNQKHLLRFIKKSYQIDADRVVYSTKEKNLTLKELFAKLKMHPYDLTVDSLDVHAGRQTFQRFDKFNDKYNPVGASELRDLYLKTDNYINGEYFATIIKEVGADLVEAKYQHAEPRLSIYGRSPDEWSKLSSWFVCNRIHCPNMTWMIQVPRIYDVFRSKNFLPHFGKMLENIFMPVFEATINPQADPELSVFLKHITGFDSVDDESKHSGHMFSSKSPKPQEWTLEKNPSYTYYAYYMYANIMVLNSLRKERGMNTFLFRPHCGEAGALTHLMTAFMIADDISHGLNLKKSPVLQYLFFLAQIPIAMSPLSNNSLFLEYAKNPFLDFLQKGLMISLSTDDPMQFHFTKEPLMEEYAIAAQVFKLSTCDMCEVARNSVLQCGISHEEKVKFLGDNYLEEGPAGNDIRRTNVAQIRMAYRYETWCYELNLIAEGLKSTE

SEQ ID NO: 33 - protein, 403 aa, Homo sapiens
MQRAVSVVARLGFRLQAFPPALCRPLSCAQEVLRRTPLYDFHLAHGGKMVAFAGWSLPVQYRDSHTDSHLHTRQHCSLFDVSHMLQTKILGSDRVKLMESLVVGDIAELRPNQGTLSLFTNEAGGILDDLIVTNTSEGHLYVVSNAGCWEKDLALMQDKVRELQNQGRDVGLEVLDNALLALQGPTAAQVLQAGVADDLRKLPFMTSAVMEVFGVSGCRVTRCGYTGEDGVEISVPVAGAVHLATAILKNPEVKLAGLAARDSLRLEAGLCLYGNDIDEHTTPVEGSLSWTLGKRRRAAMDFPGAKVIVPQLKGRVQRRRVGLMCEGAPMRAHSPILNMEGTKIGTVTSGCPSPSLKKNVAMGYVPCEYSRPGTMLLVEVRRKQQMAVVSKMPFVPTNYYTLK

SEQ ID NO: 34 - protein, 3957 aa, Homo sapiens
MMNEDAAQKSDSGEKFNGSSQRRKRPKKSDSNASFLRAARAGNLDKVVEYLKGGIDINTCNQNGLNALHLAAKEGHVGLVQELLGRGSSVDSATKKGNTALHIASLAGQAEVVKVLVKEGANINAQSQNGFTPLYMAAQENHIDVVKYLLENGANQSTATEDGFTPLAVALQQGHNQAVAILLENDTKGKVRLPALHIAARKDDTKSAALLLQNDHNADVQSKMMVNRTTESGFTPLHIAAHYGNVNVATLLLNRGAAVDFTARNGITPLHVASKRGNTNMVKLLLDRGGQIDAKTRDGLTPLHCAARSGHDQVVELLLERGAPLLARTKNGLSPLHMAAQGDHVECVKHLLQHKAPVDDVTLDYLTALHVAAHCGHYRVTKLLLDKRANPNARALNGFTPLHIACKKNRIKVMELLVKYGASIQAITESGLTPIHVAAFMGHLNIVLLLLQNGASPDVTNIRGETALHMAARAGQVEVVRCLLRNGALVDARAREEQTPLHIASRLGKTEIVQLLLQHMAHPDAATTNGYTPLHISAREGQVDVASVLLEAGAAHSLATKKGFTPLHVAAKYGSLDVAKLLLQRRAAADSAGKNGLTPLHVAAHYDNQKVALLLLEKGASPHATAKNGYTPLHIAAKKNQMQIASTLLNYGAETNIVTKQGVTPLHLASQEGHTDMVTLLLDKGANIHMSTKSGLTSLHLAAQEDKVNVADILTKHGADQDAHTKLGYTPLIVACHYGNVKMVNFLLKQGANVNAKTKNGYTPLHQAAQQGHTHIINVLLQHGAKPNATTANGNTALAIAKRLGYISVVDTLKVVTEEVTTTTTTITEKHKLNVPETMTEVLDVSDEEGDDTMTGDGGEYLRPEDLKELGDDSLPSSQFLDGMNYLRYSLEGGRSDSLRSFSSDRSHTLSHASYLRDSAVMDDSVVIPSHQVSTLAKEAERNSYRLSWGTENLDNVALSSSPIHSGFLVSFMVDARGGAMRGCRHNGLRIIIPPRKCTAPTRVTCRLVKRHRLATMPPMVEGEGLASRLIEVGPSGAQFLGKLHLPTAPPPLNEGESLVSRILQLGPPGTKFLGPVIVEIPHFAALRGKERELVVLRSENGDSWKEHFCDYTEDELNEILNGMDEVLDSPEDLEKKRICRIITRDFPQYFAVVSRIKQDSNLIGPEGGVLSSTVVPQVQAVFPEGALTKRIRVGLQAQPMHSELVKKILGNKATFSPIVTLEPRRRKFHKPITMTIPVPKASSDVMLNGFGGDAPTLRLLCSITGGTTPAQWEDITGTTPLTFVNECVSFTTNVSARFWLIDCRQIQESVTFASQVYREIICVPYMAKFVVFAKSHDPIEARLRCFCMTDDKVDKTLEQQENFAEVARSRDVEVLEGKPIYVDCFGNLVPLTKSGQHHIFSFFAFKENRLPLFVKVRDTTQEPCGRLSFMKEPKSTRGLVHQAICNLNITLPIYTKESESDQEQEEEIDMTSEKNDETESTETSVLKSHLVNEVPVLASPDLLSEVSEMKQDLIKMTAILTTDVSDKAGSIKVKELVKAAEEEPGEPFEIVERVKEDLEKVNEILRSGTCTRDESSVQSSRSERGLVEEEWVIVSDEEIEEARQKAPLEITEYPCVEVRIDKEIKGKVEKDSTGLVNYLTDDLNTCVPLPKEQLQTVQDKAGKKCEALAVGRSSEKEGKDIPPDETQSTQKQHKPSLGIKKPVRRKLKEKQKQKEEGLQASAEKAELKKGSSEESLGEDPGLAPEPLPTVKATSPLIEETPIGSIKDKVKALQKRVEDEQKGRSKLPIRVKGKEDVPKKTTHRPHPAASPSLKSERHAPGSPSPKTERHSTLSSSAKTERHPPVSPSSKTEKHSPVSPSAKTERHSPASSSSKTEKHSPVSPSTKTERHSPVSSTKTERHPPVSPSGKTDKRPPVSPSGRTEKHPPVSPGRTEKRLPVSPSGRTDKHQPVSTAGKTEKHLPVSPSGKTEKQPPVSPTSKTERIEETMSVRELMKAFQSGQDPSKHKTGLFEHKSAKQKQPQEKGKVRVEKEKGPILTQREAQKTENQTIKRGQRLPVTGTAESKRGVRVSSIGVKKEDAAGGKEKVLSHKIPEPVQSVPEEESHRESEVPKEKMADEQGDMDLQISPDRKTSTDFSEVIKQELEDNDKYQQFRLSEETEKAQLHLDQVLTSPFNTTFPLDYMKDEFLPALSLQSGALDGSSESLKNEGVAGSPCGSLMEGTPQISSEESYKHEGLAETPETSPESLSFSPKKSEEQTGETKESTKTETTTEIRSEKEHPTTKDITGGSEERGATVTEDSETSTESFQKEATLGSPKDTSPKRQDDCTGSCSVALAKETPTGLTEEAACDEGQRTFGSSAHKTQTDSEVQESTATSDETKALPLPEASVKTDTGTESKPQGVIRSPQGLELALPSRDSEVLSAVADDSLAVSHKDSLEASPVLEDNSSHKTPDSLEPSPLKESPCRDSLESSPVEPKMKAGIFPSHFPLPAAVAKTELLTEVASVRSRLLRDPDGSAEDDSLEQTSLMESSGKSPLSPDTPSSEEVSYEVTPKTTDVSTPKPAVIHECAEEDDSENGEKKRFTPEEEMFKMVTKIKMFDELEQEAKQKRDYKKEPKQEESSSSSDPDADCSVDVDEPKHTGSGEDESGVPVLVTSESRKVSSSSESEPELAQLKKGADSGLLPEPVIRVQPPSPLPSSMDSNSSPEEVQFQPVVSKQYTFKMNEDTQEEPGKSEEEKDSESHLAEDRHAVSTEAEDRSYDKLNRDTDQPKICDGHGCEAMSPSSSAAPVSSGLQSPTGDDVDEQPVIYKESLALQGTHEKDTEGEELDVSRAESPQADCPSESFSSSSSLPHCLVSEGKELDEDISATSSIQKTEVTKTDETFENLPKDCPSQDSSITTQTDRFSMDVPVSDLAENDEIYDPQITSPYENVPSQSFFSSEESKTQTDANHTTSFHSSEVYSVTITSPVEDVVVASSSSGTVLSKESNFEGQDIKMESQQESTLWEMQSDSVSSSFEPTMSATTTVVGEQISKVIITKTDVDSDSWSEIREDDEAFEARVKEEEQKIFGLMVDRQSQGTTPDTTPARTPTEEGTPTSEQNPFLFQEGKLFEMTRSGAIDMTKRSYADESFHFFQIGQESREETLSEDVKEGATGADPLPLETSAESLALSESKETVDDEADLLPDDVSEEVEEIPASDAQLNSQMGISASTETPTKEAVSVGTKDLPTVQTGDIPPLSGVKQISCPDSSEPAVQVQLDFSTLTRSVYSDRGDDSPDSSPEEQKSVIEIPTAPMENVPFTESKSKIPVRTMPTSTPAPPSAEYESSVSEDFLSSVDEENKADEAKPKSKLPVKVPLQRVEQQLSDLDTSVQKTVAPQGQDMASIAPDNRSKSESDASSLDSKTKCPVKTRSYTETETESRERAEELELESEEGATRPKILTSRLPVKSRSTTSSCRGGTSPTKESKEHFFDLYRNSIEFFEEISDEASKLVDRLTQSEREQEIVSDDESSSALEVSVIENLPPVETEHSVPEDIFDTRPIWDESIETLIERIPDENGHDHAEDPQDEQERIEERLAYIADHLGFSWTELARELDFTEEQIHQIRIENPNSLQDQSHALLKYWLERDGKHATDTNLVECLTKINRMDIVHLMETNTEPLQERISHSYAEIEQTITLDHSEGFSVLQEELCTAQHKQKEEQAVSKESETCDHPPIVSEEDISVGYSTFQDGVPKTEGDSSATALFPQTHKEQVQQDFSGKMQDLPEESSLEYQQEYFVTTPGTETSETQKAMIVPSSPSKTPEEVSTPAEEEKLYLQTPTSSERGGSPIIQEPEEPSEHREESSPRKTSLVIVESADNQPETCERLDEDAAFEKGDDMPEIPPETVTEEEYIDEHGHTVVKKVTRKIIRRYVSSEGTEKEEIMVQGMPQEPVNIEEGDGYSKVIKRVVLKSDTEQSEDNNE

SEQ ID NO: 35 - protein, 4377 aa, Homo sapiens
MAHAASQLKKNRDLEINAEEEPEKKRKHRKRSRDRKKKSDANASYLRAARAGHLEKALDYIKNGVDINICNQNGLNALHLASKEGHVEVVSELLQREANVDAATKKGNTALHIASLAGQAEVVKVLVTNGANVNAQSQNGFTPLYMAAQENHLEVVKFLLDNGASQSLATEDGFTPLAVALQQGHDQVVSLLLENDTKGKVRLPALHIAARKDDTKAAALLLQNDNNADVESKSGFTPLHIAAHYGNINVATLLLNRAAAVDFTARNDITPLHVASKRGNANMVKLLLDRGAKIDAKTRDGLTPLHCGARSGHEQVVEMLLDRAAPILSKTKNGLSPLHMATQGDHLNCVQLLLQHNVPVDDVTNDYLTALHVAAHCGHYKVAKVLLDKKANPNAKALNGFTPLHIACKKNRIKVMELLLKHGASIQAVTESGLTPIHVAAFMGHVNIVSQLMHHGASPNTTNVRGETALHMAARSGQAEVVRYLVQDGAQVEAKAKDDQTPLHISARLGKADIVQQLLQQGASPNAATTSGYTPLHLSAREGHEDVAAFLLDHGASLSITTKKGFTPLHVAAKYGKLEVANLLLQKSASPDAAGKSGLTPLHVAAHYDNQKVALLLLDQGASPHAAAKNGYTPLHIAAKKNQMDIATTLLEYGADANAVTRQGIASVHLAAQEGHVDMVSLLLGRNANVNLSNKSGLTPLHLAAQEDRVNVAEVLVNQGAHVDAQTKMGYTPLHVGCHYGNIKIVNFLLQHSAKVNAKTKNGYTPLHQAAQQGHTHIINVLLQNNASPNELTVNGNTALGIARRLGYISVVDTLKIVTEETMTTTTVTEKHKMNVPETMNEVLDMSDDEVRKANAPEMLSDGEYISDVEEGEDAMTGDTDKYLGPQDLKELGDDSLPAEGYMGFSLGARSASLRSFSSDRSYTLNRSSYARDSMMIEELLVPSKEQHLTFTREFDSDSLRHYSWAADTLDNVNLVSSPIHSGFLVSFMVDARGGSMRGSRHHGMRIIIPPRKCTAPTRITCRLVKRHKLANPPPMVEGEGLASRLVEMGPAGAQFLGPVIVEIPHFGSMRGKERELIVLRSENGETWKEHQFDSKNEDLTELLNGMDEELDSPEELGKKRICRIITKDFPQYFAVVSRIKQESNQIGPEGGILSSTTVPLVQASFPEGALTKRIRVGLQAQPVPDEIVKKILGNKATFSPIVTVEPRRRKFHKPITMTIPVPPPSGEGVSNGYKGDTTPNLRLLCSITGGTSPAQWEDITGTTPLTFIKDCVSFTTNVSARFWLADCHQVLETVGLATQLYRELICVPYMAKFVVFAKMNDPVESSLRCFCMTDDKVDKTLEQQENFEEVARSKDIEVLEGKPIYVDCYGNLAPLTKGGQQLVFNFYSFKENRLPFSIKIRDTSQEPCGRLSFLKEPKTTKGLPQTAVCNLNITLPAHKKETESDQDDEIEKTDRRQSFASLALRKRYSYLTEPGMIERSTGATRSLPTTYSYKPFFSTRPYQSWTTAPITVPGPAKSGFTSLSSSSSNTPSASPLKSIWSVSTPSPIKSTLGASTTSSVKSISDVASPIRSFRTMSSPIKTVVSQSPYNIQVSSGTLARAPAVTEATPLKGLASNSTFSSRTSPVTTAGSLLERSSITMTPPASPKSNINMYSSSLPFKSIITSAAPLISSPLKSVVSPVKSAVDVISSAKITMASSLSSPVKQMPGHAEVALVNGSISPLKYPSSSTLINGCKATATLQEKISSATNSVSSVVSAATDTVEKVFSTTTAMPFSPLRSYVSAAPSAFQSLRTPSASALYTSLGSSISATTSSVTSSIITVPVYSVVNVLPEPALKKLPDSNSFTKSAAALLSPIKTLTTETHPQPHFSRTSSPVKSSLFLAPSALKLSTPSSLSSSQEILKDVAEMKEDLMRMTAILQTDVPEEKPFQPELPKEGRIDDEEPFKIVEKVKEDLVKVSEILKKDVCVDNKGSPKSPKSDKGHSPEDDWIEFSSEEIREARQQAAASQSPSLPERVQVKAKAASEKDYNLTKVIDYLTNDIGSSSLTNLKYKFEDAKKDGEERQKRVLKPAIALQEHKLKMPPASMRTSTSEKELCKMADSFFGTDTILESPDDFSQHDQDKSPLSDSGFETRSEKTPSAPQSAESTGPKPLFHEVPIPPVITETRTEVVHVIRSYDPSAGDVPQTQPEEPVSPKPSPTFMELEPKPTTSSIKEKVKAFQMKASSEEDDHNRVLSKGMRVKEETHITTTTRMVYHSPPGGEGASERIEETMSVHDIMKAFQSGRDPSKELAGLFEHKSAVSPDVHKSAAETSAQHAEKDNQMKPKLERIIEVHIEKGNQAEPTEVIIRETKKHPEKEMYVYQKDLSRGDINLKDFLPEKHDAFPCSEEQGQQEEEELTAEESLPSYLESSRVNTPVSQEEDSRPSSAQLISDDSYKTLKLLSQHSIEYHDDELSELRGESYRFAEKMLLSEKLDVSHSDTEESVTDHAGPPSSELQGSDKRSREKIATAPKKEILSKIYKDVSENGVGKVSKDEHFDKVTVLHYSGNVSSPKHAMWMRFTEDRLDRGREKLIYEDRVDRTVKEAEEKLTEVSQFFRDKTEKLNDELQSPEKKARPKNGKEYSSQSPTSSSPEKVLLTELLASNDEWVKARQHGPDGQGFPKAEEKAPSLPSSPEKMVLSQQTEDSKSTVEAKGSISQSKAPDGPQSGFQLKQSKLSSIRLKFEQGTHAKSKDMSQEDRKSDGQSRIPVKKIQESKLPVYQVFAREKQQKAIDLPDESVSVQKDFMVLKTKDEHAQSNEIVVNDSGSDNVKKQRTEMSSKAMPDSFSEQQAKDLACHITSDLATRGPWDKKVFRTWESSGATNNKSQKEKLSHVLVHDVRENHIGHPESKSVDQKNEFMSVTERERKLLTNGSLSEIKEMTVKSPSKKVLYREYVVKEGDHPGGLLDQPSRRSESSAVSHIPVRVADERRMLSSNIPDGFCEQSAFPKHELSQKLSQSSMSKETVETQHFNSIEDEKVTYSEISKVSKHQSYVGLCPPLEETETSPTKSPDSLEFSPGKESPSSDVFDHSPIDGLEKLAPLAQTEGGKEIKTLPVYVSFVQVGKQYEKEIQQGGVKKIISQECKTVQETRGTFYTTRQQKQPPSPQGSPEDDTLEQVSFLDSSGKSPLTPETPSSEEVSYEFTSKTPDSLIAYIPGKPSPIPEVSEESEEEEQAKSTSLKQTTVEETAVEREMPNDVSKDSNQRPKNNRVAYIEFPPPPPLDADQIESDKKHHYLPEKEVDMIEVNLQDEHDKYQLAEPVIRVQPPSPVPPGADVSDSSDDESIYQPVPVKKYTFKLKEVDDEQKEKPKASAEKASNQKELESNGSGKDNEFGLGLDSPQNEIAQNGNNDQSITECSIATTAEFSHDTDATEIDSLDGYDLQDEDDGLTESDSKLPIQAMEIKKDIWNTEGILKPADRSFSQSKLEVIEEEGKVGPDEDKPPSKSSSSEKTPDKTDQKSGAQFFTLEGRHPDRSVFPDTYFSYKVDEEFATPFKTVATKGLDFDPWSNNRGDDEVFDSKSREDETKPFGLAVEDRSPATTPDTTPARTPTDESTPTSEPNPFPFHEGKMFEMTRSGAIDMSKRDFVEERLQFFQIGEHTSEGKSGDQGEGDKSMVTATPQPQSGDTTVETNLERNVETPTVEPNPSIPTSGECQEGTSSSGSLEKSAAATNTSKVDPKLRTPIKMGISASTMTMKKEGPGEITDKIEAVMTSCQGLENETITMISNTANSQMGVRPHEKHDFQKDNFNNNNNLDSSTIQTDNIMSNIVLTEHSAPTCTTEKDNPVKVSSGKKTGVLQGHCVRDKQKVLGEQQKTKELIGIRQKSKLPIKATSPKDTFPPNHMSNTKASKMKQVSQSEKTKALTTSSCVDVKSRIPVKNTHRDNIIAVRKACATQKQGQPEKGKAKQLPSKLPVKVRSTCVTTTTTTATTTTTTTTTTTTSCTVKVRKSQLKEVCKHSIEYFKGISGETLKLVDRLSEEEKKMQSELSDEEESTSRNTSLSETSRGGQPSVTTKSARDKKTEAAPLKSKSEKAGSEKRSSRRTGPQSPCERTDIRMAIVADHLGLSWTELARELNFSVDEINQIRVENPNSLISQSFMLLKKWVTRDGKNATTDALTSVLTKINRIDIVTLLEGPIFDYGNISGTRSFADENNVFHDPVDGWQNETSSGNLESCAQARRVTGGLLDRLDDSPDQCRDSITSYLKGEAGKFEANGSHTEITPEAKTKSYFPESQNDVGKQSTKETLKPKIHGSGHVEEPASPLAAYQKSLEETSKLIIEETKPCVPVSMKKMSRTSPADGKPRLSLHEEEGSSGSEQKQGEGFKVKTKKEIRHVEKKSHS

SEQ ID NO: 36 - protein, 2663 aa, Homo sapiens
MPKGGCPKAPQQEELPLSSDMVEKQTGKKDKDKVSLTKTPKLERGDGGKEVRERASKRKLPFTAGANGEQKDSDTEKQGPERKRIKKEPVTRKAGLLFGMGLSGIRAGYPLSERQQVALLMQMTAEESANSPVDTTPKHPSQSTVCQKGTPNSASKTKDKVNKRNERGETRLHRAAIRGDARRIKELISEGADVNVKDFAGWTALHEACNRGYYDVAKQLLAAGAEVNTKGLDDDTPLHDAANNGHYKVVKLLLRYGGNPQQSNRKGETPLKVANSPTMVNLLLGKGTYTSSEESSTESSEEEDAPSFAPSSSVDGNNTDSEFEKGLKHKAKNPEPQKATAPVKDEYEFDEDDEQDRVPPVDDKHLLKKDYRKETKSNSFISIPKMEVKSYTKNNTIAPKKASHRILSDTSDEEDASVTVGTGEKLRLSAHTILPGSKTREPSNAKQQKEKNKVKKKRKKETKGREVRFGKRSDKFCSSESESESSESGEDDRDSLGSSGCLKGSPLVLKDPSLFSSLSASSTSSHGSSAAQKQNPSHTDQHTKHWRTDNWKTISSPAWSEVSSLSDSTRTRLTSESDYSSEGSSVESLKPVRKRQEHRKRASLSEKKSPFLSSAEGAVPKLDKEGKVVKKHKTKHKHKNKEKGQCSISQELKLKSFTYEYEDSKQKSDKAILLENDLSTENKLKVLKHDRDHFKKEEKLSKMKLEEKEWLFKDEKSLKRIKDTNKDISRSFREEKDRSNKAEKERSLKEKSPKEEKLRLYKEERKKKSKDRPSKLEKKNDLKEDKISKEKEKIFKEDKEKLKKEKVYREDSAFDEYCNKNQFLENEDTKFSLSDDQRDRWFSDLSDSSFDFKGEDSWDSPVTDYRDMKSDSVAKLILETVKEDSKERRRDSRAREKRDYREPFFRKKDRDYLDKNSEKRKEQTEKHKSVPGYLSEKDKKRRESAEAGRDRKDALESCKERRDGRAKPEEAHREELKECGCESGFKDKSDGDFGKGLEPWERHHPAREKEKKDGPDKERKEKTKPERYKEKSSDKDKSEKSILEKCQKDKEFDKCFKEKKDTKEKHKDTHGKDKERKASLDQGKEKKEKAFPGIISEDFSEKKDDKKGKEKSWYIADIFTDESEDDRDSCMGSGFKMGEASDLPRTDGLQEKEEGREAYASDRHRKSSDKQHPERQKDKEPRDRRKDRGAADAGRDKKEKVFEKHKEKKDKESTEKYKDRKDRASVDSTQDKKNKQKLPEKAEKKHAAEDKAKSKHKEKSDKEHSKERKSSRSADAEKSLLEKLEEEALHEYREDSNDKISEVSSDSFTDRGQEPGLTAFLEVSFTEPPGDDKPRESACLPEKLKEKERHRHSSSSSKKSHDRERAKKEKAEKKEKGEDYKEGGSRKDSGQYEKDFLEADAYGVSYNMKADIEDELDKTIELFSTEKKDKNDSEREPSKKIEKELKPYGSSAINILKEKKKREKHREKWRDEKERHRDRHADGLLRHHRDELLRHHRDEQKPATRDKDSPPRVLKDKSRDEGPRLGDAKLKEKFKDGAEKEKGDPVKMSNGNDKVAPSKDPGKKDARPREKLLGDGDLMMTSFERMLSQKDLEIEERHKRHKERMKQMEKLRHRSGDPKLKEKAKPADDGRKKGLDIPAKKPPGLDPPFKDKKLKESTPIPPAAENKLHPASGADSKDWLAGPHMKEVLPASPRPDQSRPTGVPTPTSVLSCPSYEEVMHTPRTPSCSADDYADLVFDCADSQHSTPVPTAPTSACSPSFFDRFSVASSGLSENASQAPARPLSTNLYRSVSVDIRRTPEEEFSVGDKLFRQQSVPAASSYDSPMPPSMEDRAPLPPVPAEKFACLSPGYYSPDYGLPSPKVDALHCPPAAVVTVTPSPEGVFSSLQAKPSPSPRAELLVPSLEGALPPDLDTSEDQQATAAIIPPEPSYLEPLDEGPFSAVITEEPVEWAHPSEQALASSLIGGTSENPVSWPVGSDLLLKSPQRFPESPKRFCPADPLHSAAPGPFSASEAPYPAPPASPAPYALPVAEPGLEDVKDGVDAVPAAISTSEAAPYAPPSGLESFFSNCKSLPEAPLDVAPEPACVAAVAQVEALGPLENSFLDGSRGLSHLGQVEPVPWADAFAGPEDDLDLGPFSLPELPLQTKDAADGEAEPVEESLAPPEEMPPGAPGVINGGDVSTVVAEEPPALPPDQASTRLPAELEPEPSGEPKLDVALEAAVEAETVPEERARGDPDSSVEPAPVPPEQRPLGSGDQGAEAEGPPAASLCAPDGPAPNTVAQAQAADGAGPEDDTEASRAAAPAEGPPGGIQPEAAEPKPTAEAPKAPRVEEIPQRMTRNRAQMLANQSKQGPPPSEKECAPTPAPVTRAKARGSEDDDAQAQHPRKRRFQRSTQQLQQQLNTSTQQTREVIQQTLAAIVDAIKLDAIEPYHSDRANPYFEYLQIRKKIEEKRKILCCITPQAPQCYAEYVTYTGSYLLDGKPLSKLHIPVIAPPPSLAEPLKELFRQQEAVRGKLRLQHSIEREKLIVSCEQEILRVHCRAARTIANQAVPFSACTMLLDSEVYNMPLESQGDENKSVRDRFNARQFISWLQDVDDKYDRMKTCLLMRQQHEAAALNAVQRMEWQLKVQELDPAGHKSLCVNEVPSFYVPMVDVNDDFVLLPA

SEQ ID NO: 37 - protein, 1248 aa, Homo sapiens
MGKDQELLEAARTGNVALVEKLLSGRKGGILGGGSGPLPLSNLLSIWRGPNVNCTDSSGYTALHHAALNGHKDIVLKLLQYEASTNVADNKGYFPIHLAAWKGDVEIVKILIHHGPSHSRVNEQNNENETALHCAAQYGHSEVVAVLLEELTDPTIRNSKLETPLDLAALYGRLRVVKMIISAHPNLMSCNTRKHTPLHLAARNGHKAVVQVLLEAGMDVSCQTEKGSALHEAALFGKVDVVRVLLETGIDANIKDSLGRTVLDILKEHPSQKSLQIATLLQEYLEGVGRSTVLEEPVQEDATQETHISSPVESPSQKTKSETVTGELSKLLDEIKLCQEKDYSFEDLCHTISDHYLDNLSKISEEELGKNGSQSVRTSSTINLSPGEVEEEDDDENTCGPSGLWEALTPCNGCRNLGFPMLAQESYPKKRNYTMEIVPSASLDTFPSENENFLCDLMDTAVTKKPCSLEIARAPSPRTDNASEVAVTTPGTSNHRNSSTGPTPDCSPPSPDTALKNIVKVIRPQPKQRTSIVSSLDFHRMNHNQEYFEINTSTGCTSFTASPPASPPTSSVGTTEVKNEGTNHTDDLSRQDDNDPPKEYDPGQFAGLLHGSSPACESPENPFHLYGKREQCEKGQDEVSLANSPLPFKQSPIENNSEPLVKKIKPKVVSRTIFHKKSNQLENHTIVGTRSTRSGSRNGDQWVMNAGGFVERACTLGRIRSLPKALIDMHLSKSVSKSDSDLIAYPSNEKTSRVNWSESSTAEHSSKGNSERTPSFTSEWEEIDKIMSSIDVGINNELKEMNGETTRPRCPVQTVGQWLESIGLPQYENHLMANGFDNVQFMGSNVMEDQDLLEIGILNSGHRQRILQAIQLLPKMRPIGHDGYHPTSVAEWLDSIELGDYTKAFLINGYTSMDLLKKIWEVELINVLKINLIGHRKRILASLGDRLHDDPPQKPPRSITLREPSGNHTPPQLSPSLSQSTYTTGGSLDVPHIIMQGDARRRRNENYFDDIPRSKLERQMAQTGDWGEPSITLRPPNEATASTPVQYWQHHPEKLIFQSCDYKAFYLGSMLIKELRGTESTQDACAKMRANCQKSTEQMKKVPTIILSVSYKGVKFIDATNKNIIAEHEIRNISCAAQDPEDLSTFAYITKDLKSNHHYCHVFTAFDVNLAYEIILTLGQAFEVAYQLALQARKGGHSSTLPESFENKPSKPIPKPRVSIRKSVDLLHASHTGQEPSERHTEEALRKF

SEQ ID NO: 38 - protein, 346 aa, Homo sapiens
MAMVSEFLKQAWFIENEEQEYVQTVKSSKGGPGSAVSPYPTFNPSSDVAALHKAIMVKGVDEATIIDILTKRNNAQRQQIKAAYLQETGKPLDETLKKALTGHLEEVVLALLKTPAQFDADELRAAMKGLGTDEDTLIEILASRTNKEIRDINRVYREELKRDLAKDITSDTSGDFRNALLSLAKGDRSEDFGVNEDLADSDARALYEAGERRKGTDVNVFNTILTTRSYPQLRRVFQKYTKYSKHDMNKVLDLELKGDIEKCLTAIVKCATSKPAFFAEKLHQAMKGVGTRHKALIRIMVSRSEIDMNDIKAFYQKMYGISLCQAILDETKGDYEKILVALCGGN

SEQ ID NO: 39 - protein, 157 aa, Homo sapiens
MQFMLLFSRQGKLRLQKWYVPLSDKEKKKITRELVQTVLARKPKMCSFLEWRDLKIVYKRYASLYFCCAIEDQDNELITLEIIHRYVELLDKYFGSVCELDIIFNFEKAYFILDEFLLGGEVQETSKKNVLKAIEQADLLQEEAETPRSVLEEIGLT

SEQ ID NO: 40 - protein, 749 aa, Homo sapiens
MAHRKLESVGSGMLDHRVRPGPVPHSQEPESEDMELPLEGYVPEGLELAALRPESPAPEEQECHNHSPDGDSSSDYVNNTSEEEDYDEGLPEEEEGITYYIRYCPEDDSYLEGMDCNGEEYLAHSAHPVDTDECQEAVEEWTDSAGPHPHGHEAEGSQDYPDGQLPIPEDEPSVLEAHDQEEDGHYCASKEGYQDYYPEEANGNTGASPYRLRRGDGDLEDQEEDIDQIVAEIKMSLSMTSITSASEASPEHGPEPGPEDSVEACPPIKASCSPSRHEARPKSLNLLPEAKHPGDPQRGFKPKTRTPEERLKWPHEQVCNGLEQPRKQQRSDLNGPVDNNNIPETKKVASFPSFVAVPGPCEPEDLIDGIIFAANYLGSTQLLSERNPSKNIRMMQAQEAVSRVKRMQKAAKIKKKANSEGDAQTLTEVDLFISTQRIKVLNADTQETMMDHALRTISYIADIGNIVVLMARRRMPRSASQDCIETTPGAQEGKKQYKMICHVFESEDAQLIAQSIGQAFSVAYQEFLRANGINPEDLSQKEYSDIINTQEMYNDDLIHFSNSENCKELQLEKHKGEILGVVVVESGWGSILPTVILANMMNGGPAARSGKLSIGDQIMSINGTSLVGLPLATCQGIIKGLKNQTQVKLNIVSCPPVTTVLIKRPDLKYQLGFSVQNGIICSLMRGGIAERGGVRVGHRIIEINGQSVVATAHEKIVQALSNSVGEIHMKTMPAAMFRLLTGQETPLYI

SEQ ID NO: 41 - skipped

SEQ ID NO: 42 - protein, 2843 aa, Homo sapiens
MAAASYDQLLKQVEALKMENSNLRQELEDNSNHLTKLETEASNMKEVLKQLQGSIEDEAMASSGQIDLLERLKELNLDSSNFPGVKLRSKMSLRSYGSREGSVSSRSGECSPVPMGSFPRRGFVNGSRESTGYLEELEKERSLLLADLDKEEKEKDWYYAQLQNLTKRIDSLPLTENFSLQTDMTRRQLEYEARQIRVAMEEQLGTCQDMEKRAQRRIARIQQIEKDILRIRQLLQSQATEAERSSQNKHETGSHDAERQNEGQGVGEINMATSGNGQGSTTRMDHETASVLSSSSTHSAPRRLTSHLGTKVEMVYSLLSMLGTHDKDDMSRTLLAMSSSQDSCISMRQSGCLPLLIQLLHGNDKDSVLLGNSRGSKEARARASAALHNIIHSQPDDKRGRREIRVLHLLEQIRAYCETCWEWQEAHEPGMDQDKNPMPAPVEHQICPAVCVLMKLSFDEEHRHAMNELGGLQAIAELLQVDCEMYGLTNDHYSITLRRYAGMALTNLTFGDVANKATLCSMKGCMRALVAQLKSESEDLQQVIASVLRNLSWRADVNSKKTLREVGSVKALMECALEVKKESTLKSVLSALWNLSAHCTENKADICAVDGALAFLVGTLTYRSQTNTLAIIESGGGILRNVSSLIATNEDHRQILRENNCLQTLLQHLKSHSLTIVSNACGTLWNLSARNPKDQEALWDMGAVSMLKNLIHSKHKMIAMGSAAALRNLMANRPAKYKDANIMSPGSSLPSLHVRKQKALEAELDAQHLSETFDNIDNLSPKASHRSKQRHKQSLYGDYVFDTNRHDDNRSDNFNTGNMTVLSPYLNTTVLPSSSSSRGSLDSSRSEKDRSLERERGIGLGNYHPATENPGTSSKRGLQISTTAAQIAKVMEEVSAIHTSQEDRSSGSTTELHCVTDERNALRRSSAAHTHSNTYNFTKSENSNRTCSMPYAKLEYKRSSNDSLNSVSSSDGYGKRGQMKPSIESYSEDDESKFCSYGQYPADLAHKIHSANHMDDNDGELDTPINYSLKYSDEQLNSGRQSPSQNERWARPKHIIEDEIKQSEQRQSRNQSTTYPVYTESTDDKHLKFQPHFGQQECVSPYRSRGANGSETNRVGSNHGINQNVSQSLCQEDDYEDDKPTNYSERYSEEEQHEEEERPTNYSIKYNEEKRHVDQPIDYSLKYATDIPSSQKQSFSFSKSSSGQSSKTEHMSSSSENTSTPSSNAKRQNQLHPSSAQSRSGQPQKAATCKVSSINQETIQTYCVEDTPICFSRCSSLSSLSSAEDEIGCNQTTQEADSANTLQIAEIKEKIGTRSAEDPVSEVPAVSQHPRTKSSRLQGSSLSSESARHKAVEFSSGAKSPSKSGAQTPKSPPEHYVQETPLMFSRCTSVSSLDSFESRSIASSVQSEPCSGMVSGIISPSDLPDSPGQTMPPSRSKTPPPPPQTAQTKREVPKNKAPTAEKRESGPKQAAVNAAVQRVQVLPDADTLLHFATESTPDGFSCSSSLSALSLDEPFIQKDVELRIMPPVQENDNGNETESEQPKESNENQEKEAEKTIDSEKDLLDDSDDDDIEILEECIISAMPTKSSRKAKKPAQTASKLPPPVARKPSQLPVYKLLPSQNRLQPQKHVSFTPGDDMPRVYCVEGTPINFSTATSLSDLTIESPPNELAAGEGVRGGAQSGEFEKRDTIPTEGRSTDEAQGGKTSSVTIPELDDNKAEEGDILAECINSAMPKGKSHKPFRVKKIMDQVQQASASSSAPNKNQLDGKKKKPTSPVKPIPQNTEYRTRVRKNADSKNNLNAERVFSDNKDSKKQNLKNNSKVFNDKLPNNEDRVRGSFAFDSPHHYTPIEGTPYCFSRNDSLSSLDFDDDDVDLSREKAELRKAKENKESEAKVTSHTELTSNQQSANKTQAIAKQPINRGQPKPILQKQSTFPQSSKDIPDRGAATDEKLQNFAIENTPVCFSHNSSLSSLSDIDQENNNKENEPIKETEPPDSQGEPSKPQASGYAPKSFHVEDTPVCFSRNSSLSSLSIDSEDDLLQECISSAMPKKKKPSRLKGDNEKHSPRNMGGILGEDLTLDLKDIQRPDSEHGLSPDSENFDWKAIQEGANSIVSSLHQAAAAACLSRQASSDSDSILSLKSGISLGSPFHLTPDQEEKPFTSNKGPRILKPGEKSTLETKKIESESKGIKGGKKVYKSLITGKVRSNSEISGQMKQPLQANMPSISRGRTMIHIPGVRNSSSSTSPVSKKGPPLKTPASKSPSEGQTATTSPRGAKPSVKSELSPVARQTSQIGGSSKAPSRSGSRDSTPSRPAQQPLSRPIQSPGRNSISPGRNGISPPNKLSQLPRTSSPSTASTKSSGSGKMSYTSPGRQMSQQNLTKQTGLSKNASSIPRSESASKGLNQMNNGNGANKKVELSRMSSTKSSGSESDRSERPVLVRQSTFIKEAPSPTLRRKLEESASFESLSPSSRPASPTRSQAQTPVLSPSLPDMSLSTHSSVQAGGWRKLPPNLSPTIEYNDGRPAKRHDIARSHSESPSRLPINRSGTWKREHSKHSSSLPRVSTWRRTGSSSSILSASSESSEKAKSEDEKHVNSISGTKQSKENQVSAKGTWRKIKENEFSPTNSTSQTVSSGATNGAESKTLIYQMAPAVSKTEDVWVRIEDCPINNPRSGRSPTGNTPPVIDSVSEKANPNIKDSKDNQAKQNVGNGSVPMRTVGLENRLNSFIQVDAPDQKGTEIKPGQNNPVPVSETNESSIVERTPFSSSSSSKHSSPSGTVAARVTPFNYNPSPRKSSADSTSARPSQIPTPVNNNTKKRDSKTDSTESSGTQSPKRHSGSYLVTSV

SEQ ID NO: 43 - protein, 265 aa, Homo sapiens
MGAAVFFGCTFVAFGPAFALFLITVAGDPLRVIILVAGAFFWLVSLLLASVVWFILVHVTDRSDARLQYGLLIFGAAVSVLLQEVFRFAYYKLLKKADEGLASLSEDGRSPISIRQMAYVSGLSFGIISGVFSVINILADALGPGVVGIHGDSPYYFLTSAFLTAAIILLHTFWGVVFFDACERRRYWALGLVVGSHLLTSGLTFLNPWYEASLLPIYAVTVSMGLWAFITAGGSLRSIQRSLLCRRQEDSRVMVYSALRIPPED

SEQ ID NO: 44 - protein, 770 aa, Homo sapiens
MLPGLALLLLAAWTARALEVPTDGNAGLLAEPQIAMFCGRLNMHMNVQNGKWDSDPSGTKTCIDTKEGILQYCQEVYPELQITNVVEANQPVTIQNWCKRGRKQCKTHPHFVIPYRCLVGEFVSDALLVPDKCKFLHQERMDVCETHLHWHTVAKETCSEKSTNLHDYGMLLPCGIDKFRGVEFVCCPLAEESDNVDSADAEEDDSDVWWGGADTDYADGSEDKVVEVAEEEEVAEVEEEEADDDEDDEDGDEVEEEAEEPYEEATERTTSIATTTTTTTESVEEVVREVCSEQAETGPCRAMISRWYFDVTEGKCAPFFYGGCGGNRNNFDTEEYCMAVCGSAMSQSLLKTTQEPLARDPVKLPTTAASTPDAVDKYLETPGDENEHAHFQKAKERLEAKHRERMSQVMREWEEAERQAKNLPKADKKAVIQHFQEKVESLEQEAANERQQLVETHMARVEAMLNDRRRLALENYITALQAVPPRPRHVFNMLKKYVRAEQKDRQHTLKHFEHVRMVDPKKAAQIRSQVMTHLRVIYERMNQSLSLLYNVPAVAEEIQDEVDELLQKEQNYSDDVLANMISEPRISYGNDALMPSLTETKTTVELLPVNGEFSLDDLQPWHSFGADSVPANTENEVEPVDARPAADRGLTTRPGSGLTNIKTEEISEVKMDAEFRHDSGYEVHHQKLVFFAEDVGSNKGAIIGLMVGGVVIATVIVITLVMLKKKQYTSIHHGVVEVDAAVTPEERHLSKMQQNGYENPTYKFFEQMQN

SEQ ID NO: 45 - protein, 920 aa, Homo sapiens
MEVQLGLGRVYPRPPSKTYRGAFQNLFQSVREVIQNPGPRHPEAASAAPPGASLLLLQQQQQQQQQQQQQQQQQQQQQQQETSPRQQQQQQGEDGSPQAHRRGPTGYLVLDEEQQPSQPQSALECHPERGCVPEPGAAVAASKGLPQQLPAPPDEDDSAAPSTLSLLGPTFPGLSSCSADLKDILSEASTMQLLQQQQQEAVSEGSSSGRAREASGAPTSSKDNYLGGTSTISDNAKELCKAVSVSMGLGVEALEHLSPGEQLRGDCMYAPLLGVPPAVRPTPCAPLAECKGSLLDDSAGKSTEDTAEYSPFKGGYTKGLEGESLGCSGSAAAGSSGTLELPSTLSLYKSGALDEAAAYQSRDYYNFPLALAGPPPPPPPPHPHARIKLENPLDYGSAWAAAAAQCRYGDLASLHGAGAAGPGSGSPSAAASSSWHTLFTAEEGQLYGPCGGGGGGGGGGGGGGGGGGGGGGGEAGAVAPYGYTRPPQGLAGQESDFTAPDVWYPGGMVSRVPYPSPTCVKSEMGPWMDSYSGPYGDMRLETARDHVLPIDYYFPPQKTCLICGDEASGCHYGALTCGSCKVFFKRAAEGKQKYLCASRNDCTIDKFRRKNCPSCRLRKCYEAGMTLGARKLKKLGNLKLQEEGEASSTTSPTEETTQKLTVSHIEGYECQPIFLNVLEAIEPGVVCAGHDNNQPDSFAALLSSLNELGERQLVHVVKWAKALPGFRNLHVDDQMAVIQYSWMGLMVFAMGWRSFTNVNSRMLYFAPDLVFNEYRMHKSRMYSQCVRMRHLSQEFGWLQITPQEFLCMKALLLFSIIPVDGLKNQKFFDELRMNYIKELDRIIACKRKNPTSCSRRFYQLTKLLDSVQPIARELHQFTFDLLIKSHMVSVDFPEMMAEIISVQVPKILSGKVKPIYFHTQ

SEQ ID NO: 46 - protein, 267 aa, Homo sapiens
MWDQRLVKLALLQHLRAFYGIKVKGVRGQCDRRRHETAATEIGGKIFGVPFNALPHSAVPEYGHIPSFLVDACTSLEEHIHTEGLFRKSGSVIRLKALKNKVDHGEGCLSSAPPCDIAGLLKQFFRELPEPILPADLHEALLKAQQLGTEEKNKAILLLSCLLADHTVHVLRYFFNFLRNVSLRSSENKMDSSNLAVIFAPNLLQTSEGHEKMSSNAEKKGVYQTLSWKRYQPCWVLMVSVLLHHWKALKKVNMKLLVNIREREDNV

SEQ ID NO: 47 - protein, 475 aa, Homo sapiens
MQKSTNSDTSVETLNSTRQGTGAVQMRIKNANSHHDRLSQSKSMILTDVGKVTEPISRHRRNHSQHILKDVIPPLEQLMVEKEGYLQKAKIADGGKKLRKNWSTSWIVLSSRRIEFYKESKQQALSNMKTGHKPESVDLCGAHIEWAKEKSSRKNVFQITTVSGNEFLLQSDIDFIILDWFHAIKNAIDRLPKDSSCPSRNLELFKIQRSSSTELLSHYDSDIKEQKPEHRKSLMFRLHHSASDTSDKNRVKSRLKKFITRRPSLKTLQEKGLIKDQIFGSHLHKVCERENSTVPWFVKQCIEAVEKRGLDVDGIYRVSGNLATIQKLRFIVNQEEKLNLDDSQWEDIHVVTGALKMFFRELPEPLFPYSFFEQFVEAIKKQDNNTRIEAVKSLVQKLPPPNRDTMKVLFGHLTKIVAKASKNLMSTQSLGIVFGPTLLRAENETGNMAIHMVYQNQIAELMLSEYSKIFGSEED

SEQ ID NO: 48 - protein, 748 aa, Homo sapiens
MEENNDSTENPQQGQGRQNAIKCGWLRKQGGFVKTWHTRWFVLKGDQLYYFKDEDETKPLGTIFLPGNKVSEHPCNEENPGKFLFEVVPGGDRDRMTANHESYLLMASTQNDMEDWVKSIRRVIWGPFGGGIFGQKLEDTVRYEKRYGNRLAPMLVEQCVDFIRQRGLKEEGLFRLPGQANLVKELQDAFDCGEKPSFDSNTDVHTVASLLKLYLRELPEPVIPYAKYEDFLSCAKLLSKEEEAGVKELAKQVKSLPVVNYNLLKYICRFLDEVQSYSGVNKMSVQNLATVFGPNILRPKVEDPLTIMEGTVVVQQLMSVMISKHDCLFPKDAELQSKPQDGVSNNNEIQKKATMGQLQNKENNNTKDSPSRQCSWDKSESPQRSSMNNGSPTALSGSKTNSPKNSVHKLDVSRSPPLMVKKNPAFNKGSGIVTNGSFSSSNAEGLEKTQTTPNGSLQARRSSSLKVSGTKMGTHSVQNGTVRMGILNSDTLGNPTNVRNMSWLPNGYVTLRDNKQKEQAGELGQHNRLSTYDNVHQQFSMMNLDDKQSIDSATWSTSSCEISLPENSNSCRSSTTTCPEQDFFGGNFEDPVLDGPPQDDLSHPRDYESKSDHRSVGGRSSRATSSSDNSETFVGNSSSNHSALHSLVSSLKQEMTKQKIEYESRIKSLEQRNLTLETEMMSLHDELDQERKKFTMIEIKMRNAERAKEDAEKRNDMLQKEMEQFFSTFGELTVEPRRTERGNTIWIQ

SEQ ID NO: 49 - protein, 2087 aa, Homo sapiens
METESESSTLGDDSVFWLESEVIIQVTDCEEEEREEKFRKMKSSVHSEEDDFVPELHRNVHPRERPDWEETLSAMARGADVPEIPGDLTLKTCGSTASMKVKHVKKLPFTKGHFPKMAECAHFHYENVEFGSIQLSLSEEQNEVMKNGCESKELVYLVQIACQGKSWIVKRSYEDFRVLDKHLHLCIYDRRFSQLSELPRSDTLKDSPESVTQMLMAYLSRLSAIAGNKINCGPALTWMEIDNKGNHLLVHEESSINTPAVGAAHVIKRYTARAPDELTLEVGDIVSVIDMPPKVLSTWWRGKHGFQVGLFPGHCVELINQKVPQSVTNSVPKPVSKKHGKLITFLRTFMKSRPTKQKLKQRGILKERVFGCDLGEHLLNSGFEVPQVLQSCTAFIERYGIVDGIYRLSGVASNIQRLRHEFDSEHVPDLTKEPYVQDIHSVGSLCKLYFRELPNPLLTYQLYEKFSDAVSAATDEERLIKIHDVIQQLPPPHYRTLEFLMRHLSLLADYCSITNMHAKNLAIVWAPNLLRSKQIESACFSGTAAFMEVRIQSVVVEFILNHVDVLFSGRISMAMQEGAASLSRPKSLLVSSPSTKLLTLEEAQARTQAQVNSPIVTENKYIEVGEGPAALQGKFHTIIEFPLERKRPQNKMKKSPVGSWRSFFNLGKSSSVSKRKLQRNESEPSEMKAMALKGGRAEGTLRSAKSEESLTSLHAVDGDSKLFRPRRPRSSSDALSASFNGEMLGNRCNSYDNLPHDNESEEEGGLLHIPALMSPHSAEDVDLSPPDIGVASLDFDPMSFQCSPPKAESECLESGASFLDSPGYSKDKPSANKKDAETGSSQCQTPGSTASSEPVSPLQEKLSPFFTLDLSPTEDKSSKPSSFTEKVVYAFSPKIGRKLSKSPSMSISEPISVTLPPRVSEVIGTVSNTTAQNASSSTWDKCVEERDATNRSPTQIVKMKTNETVAQEAYESEVQPLDQVAAEEVELPGKEDQSVSSSQSKAVASGQTQTGAVTHDPPQDSVPVSSVSLIPPPPPPKNVARMLALALAESAQQASTQSLKRPGTSQAGYTNYGDIAVATTEDNLSSSYSAVALDKAYFQTDRPAEQFHLQNNAPGNCDHPLPETTATGDPTHSNTTESGEQHHQVDLTGNQPHQAYLSGDPEKARITSVPLDSEKSDDHVSFPEDQSGKNSMPTVSFLDQDQSPPRFYSGDQPPSYLGASVDKLHHPLEFADKSPTPPNLPSDKIYPPSGSPEENTSTATMTYMTTTPATAQMSTKEASWDVAEQPTTADFAAATLQRTHRTNRPLPPPPSQRSAEQPPVVGQVQAATNIGLNNSHKVQGVVPVPERPPEPRAMDDPASAFISDSGAAAAQCPMATAVQPGLPEKVRDGARVPLLHLRAESVPAHPCGFPAPLPPTRMMESKMIAAIHSSSADATSSSNYHSFVTASSTSVDDALPLPLPVPQPKHASQKTVYSSFARPDVTTEPFGPDNCLHFNMTPNCQYRPQSVPPHHNKLEQHQVYGARSEPPASMGLRYNTYVAPGRNASGHHSKPCSRVEYVSSLSSSVRNTCYPEDIPPYPTIRRVQSLHAPPSSMIRSVPISRTEVPPDDEPAYCPRPLYQYKPYQSSQARSDYHVTQLQPYFENGRVHYRYSPYSSSSSSYYSPDGALCDVDAYGTVQLRPLHRLPNRDFAFYNPRLQGKSLYSYAGLAPRPRANVTGYFSPNDHNVVSMPPAADVKHTYTSWDLEDMEKYRMQSIRRESRARQKVKGPVMSQYDNMTPAVQDDLGGIYVIHLRSKSDPGKTGLLSVAEGKESRHAAKAISPEGEDRFYRRHPEAEMDRAHHHGGHGSTQPEKPSLPQKQSSLRSRKLPDMGCSLPEHRAHQEASHRQFCESKNGPPYPQGAGQLDYGSKGIPDTSEPVSYHNSGVKYAASGQESLRLNHKEVRLSKEMERPWVRQPSAPEKHSRDCYKEEEHLTQSIVPPPKPERSHSLKLHHTQNVERDPSVLYQYQPHGKRQSSVTVVSQYDNLEDYHSLPQHQRGVFGGGGMGTYVPPGFPHPQSRTYATALGQGAFLPAELSLQHPETQIHAE

SEQ ID NO: 50 - protein, 1126 aa, Homo sapiens
MVARSTDSLDGPGEGSVQPLPTAGGPSVKGKPGKRLSAPRGPFPRLADCAHFHYENVDFGHIQLLLSPDREGPSLSGENELVFGVQVTCQGRSWPVLRSYDDFRSLDAHLHRCIFDRRFSCLPELPPPPEGARAAQMLVPLLLQYLETLSGLVDSNLNCGPVLTWMELDNHGRRLLLSEEASLNIPAVAAAHVIKRYTAQAPDELSFEVGDIVSVIDMPPTEDRSWWRGKRGFQVGFFPSECVELFTERPGPGLKADADGPPCGIPAPQGISSLTSAVPRPRGKLAGLLRTFMRSRPSRQRLRQRGILRQRVFGCDLGEHLSNSGQDVPQVLRCCSEFIEAHGVVDGIYRLSGVSSNIQRLRHEFDSERIPELSGPAFLQDIHSVSSLCKLYFRELPNPLLTYQLYGKFSEAMSVPGEEERLVRVHDVIQQLPPPHYRTLEYLLRHLARMARHSANTSMHARNLAIVWAPNLLRSMELESVGMGGAAAFREVRVQSVVVEFLLTHVDVLFSDTFTSAGLDPAGRCLLPRPKSLAGSCPSTRLLTLEEAQARTQGRLGTPTEPTTPKAPASPAERRKGERGEKQRKPGGSSWKTFFALGRGPSVPRKKPLPWLGGTRAPPQPSGSRPDTVTLRSAKSEESLSSQASGAELLGAGGAPASATPTPALSPGRSLRPHLIPLLLRGAEAPLTDACQQEMCSKLRGAQGPLGPDMESPLPPPPLSLLRPGGAPPPPPKNPARLMALALAERAQQVAEQQSQQECGGTPPASQSPFHRSLSLEVGGEPLGTSGSGPPPNSLAHPGAWVPGPPPYLPRQQSDGSLLRSQRPMGTSRRGLRGPAQVSAQLRAGGGGRDAPEAAAQSPCSVPSQVPTPGFFSPAPRECLPPFLGVPKPGLYPLGPPSFQPSSPAPVWRSSLGPPAPLDRGENLYYEIGASEGSPYSGPTRSWSPFRSMPPDRLNASYGMLGQSPPLHRSPDFLLSYPPAPSCFPPDHLGYSAPQHPARRPTPPEPLYVNLALGPRGPSPASSSSSSPPAHPRSRSDPGPPVPRLPQKQRAPWGPRTPHRVPGPWGPPEPLLLYRAAPPAYGRGGELHRGSLYRNGGQRGEGAGPPPPYPTPSWSLHSEGQTRSYC

SEQ ID NO: 51 - protein, 516 aa, Homo sapiens
MTLLITGDSIVSAEAVWDHVTMANRELAFKAGDVIKVLDASNKDWWWGQIDDEEGWFPASFVRLWVNQEDEVEEGPSDVQNGHLDPNSDCLCLGRPLQNRDQMRANVINEIMSTERHYIKHLKDICEGYLKQCRKRRDMFSDEQLKVIFGNIEDIYRFQMGFVRDLEKQYNNDDPHLSEIGPCFLEHQDGFWIYSEYCNNHLDACMELSKLMKDSRYQHFFEACRLLQQMIDIAIDGFLLTPVQKICKYPLQLAELLKYTAQDHSDYRYVAAALAVMRNVTQQINERKRRLENIDKIAQWQASVLDWEGEDILDRSSELIYTGEMAWIYQPYGRNQQRVFFLFDHQMVLCKKDLIRRDILYYKGRIDMDKYEVVDIEDGRDDDFNVSMKNAFKLHNKETEEIHLFFAKKLEEKIRWLRAFREERKMVQEDEKIGFEISENQKRQAAMTVRKVPKQKGVNSARSVPPSYPPPQDPLNHGQYLVPDGIAQSQVFEFTEPKRSQSPFWQNFSRLTPFKK

SEQ ID NO: 52 - protein, 2249 aa, Homo sapiens
MAHNAGAAAAAGTHSAKSGGSEAALKEGGSAAALSSSSSSSAAAAAASSSSSSGPGSAMETGLLPNHKLKTVGEAPAAPPHQQHHHHHHAHHHHHHAHHLHHHHALQQQLNQFQQQQQQQQQQQQQQQQQQHPISNNNSLGGAGGGAPQPGPDMEQPQHGGAKDSAAGGQADPPGPPLLSKPGDEDDAPPKMGEPAGGRYEHPGLGALGTQQPPVAVPGGGGGPAAVPEFNNYYGSAAPASGGPGGRAGPCFDQHGGQQSPGMGMMHSASAAAAGAPGSMDPLQNSHEGYPNSQCNHYPGYSRPGAGGGGGGGGGGGGGSGGGGGGGGAGAGGAGAGAVAAAAAAAAAAAGGGGGGGYGGSSAGYGVLSSPRQQGGGMMMGPGGGGAASLSKAAAGSAAGGFQRFAGQNQHPSGATPTLNQLLTSPSPMMRSYGGSYPEYSSPSAPPPPPSQPQSQAAAAGAAAGGQQAAAGMGLGKDMGAQYAAASPAWAAAQQRSHPAMSPGTPGPTMGRSQGSPMDPMVMKRPQLYGMGSNPHSQPQQSSPYPGGSYGPPGPQRYPIGIQGRTPGAMAGMQYPQQQDSGDATWKETFWLMPPQYGQQGVSGYCQQGQQPYYSQQPQPPHLPPQAQYLPSQSQQRYQPQQDMSQEGYGTRSQPPLAPGKPNHEDLNLIQQERPSSLPDLSGSIDDLPTGTEATLSSAVSASGSTSSQGDQSNPAQSPFSPHASPHLSSIPGGPSPSPVGSPVGSNQSRSGPISPASIPGSQMPPQPPGSQSESSSHPALSQSPMPQERGFMAGTQRNPQMAQYGPQQTGPSMSPHPSPGGQMHAGISSFQQSNSSGTYGPQMSQYGPQGNYSRPPAYSGVPSASYSGPGPGMGISANNQMHGQGPSQPCGAVPLGRMPSAGMQNRPFPGNMSSMTPSSPGMSQQGGPGMGPPMPTVNRKAQEAAAAVMQAAANSAQSRQGSFPGMNQSGLMASSSPYSQPMNNSSSLMNTQAPPYSMAPAMVNSSAASVGLADMMSPGESKLPLPLKADGKEEGTPQPESKSKKSSSSTTTGEKITKVYELGNEPERKLWVDRYLTFMEERGSPVSSLPAVGKKPLDLFRLYVCVKEIGGLAQVNKNKKWRELATNLNVGTSSSAASSLKKQYIQYLFAFECKIERGEEPPPEVFSTGDTKKQPKLQPPSPANSGSLQGPQTPQSTGSNSMAEVPGDLKPPTPASTPHGQMTPMQGGRSSTISVHDPFSDVSDSSFPKRNSMTPNAPYQQGMSMPDVMGRMPYEPNKDPFGGMRKVPGSSEPFMTQGQMPNSSMQDMYNQSPSGAMSNLGMGQRQQFPYGASYDRRHEPYGQQYPGQGPPSGQPPYGGHQPGLYPQQPNYKRHMDGMYGPPAKRHEGDMYNMQYSSQQQEMYNQYGGSYSGPDRRPIQGQYPYPYSRERMQGPGQIQTHGIPPQMMGGPLQSSSSEGPQQNMWAARNDMPYPYQNRQGPGGPTQAPPYPGMNRTDDMMVPDQRINHESQWPSHVSQRQPYMSSSASMQPITRPPQPSYQTPPSLPNHISRAPSPASFQRSLENRMSPSKSPFLPSMKMQKVMPTVPTSQVTGPPPQPPPIRREITFPPGSVEASQPVLKQRRKITSKDIVTPEAWRVMMSLKSGLLAESTWALDTINILLYDDSTVATFNLSQLSGFLELLVEYFRKCLIDIFGILMEYEVGDPSQKALDHNAARKDDSQSLADDSGKEEEDAECIDDDEEDEEDEEEDSEKTESDEKSSIALTAPDAAADPKEKPKQASKFDKLPIKIVKKNNLFVVDRSDKLGRVQEFNSGLLHWQLGGGDTTEHIQTHFESKMEIPPRRRPPPPLSSAGRKKEQEGKGDSEEQQEKSIIATIDDVLSARPGALPEDANPGPQTESSKFPFGIQQAKSHRNIKLLEDEPRSRDETPLCTIAHWQDSLAKRCICVSNIVRSLSFVPGNDAEMSKHPGLVLILGKLILLHHEHPERKRAPQTYEKEEDEDKGVACSKDEWWWDCLEVLRDNTLVTLANISGQLDLSAYTESICLPILDGLLHWMVCPSAEAQDPFPTVGPNSVLSPQRLVLETLCKLSIQDNNVDLILATPPFSRQEKFYATLVRYVGDRKNPVCREMSMALLSNLAQGDALAARAIAVQKGSIGNLISFLEDGVTMAQYQQSQHNLMHMQPPPLEPPSVDMMCRAAKALLAMARVDENRSEFLLHEGRLLDISISAVLNSLVASVICDVLFQIGQL

SEQ ID NO: 53 - protein, 717 aa, Homo sapiens
MATPAAVNPPEMASDIPGSVTLPVAPMAATGQVRMAGAMPARGGKRRSGMDFDDEDGEGPSKFSRENHSEIERRRRNKMTQYITELSDMVPTCSALARKPDKLTILRMAVSHMKSMRGTGNKSTDGAYKPSFLTEQELKHLILEAADGFLFVVAAETGRVIYVSDSVTPVLNQPQSEWFGSTLYEQVHPDDVEKLREQLCTSENSMTGRILDLKTGTVKKEGQQSSMRMCMGSRRSFICRMRCGNAPLDHLPLNRITTMRKRFRNGLGPVKEGEAQYAVVHCTGYIKAWPPAGMTIPEEDADVGQGSKYCLVAIGRLQVTSSPVCMDMNGMSVPTEFLSRHNSDGIITFVDPRCISVIGYQPQDLLGKDILEFCHPEDQSHLRESFQQVVKLKGQVLSVMYRFRTKNREWMLIRTSSFTFQNPYSDEIEYIICTNTNVKQLQQQQAELEVHQRDGLSSYDLSQVPVPNLPAGVHEAGKSVEKADAIFSQERDPRFAEMFAGISASEKKMMSSASAAGTQQIYSQGSPFPSGHSGKAFSSSVVHVPGVNDIQSSSSTGQNMSQISRQLNQSQVAWTGSRPPFPGQQIPSQSSKTQSSPFGIGTSHTYPADPSSYSPLSSPATSSPSGNAYSSLANRTPGFAESGQSSGQFQGRPSEVWSQWQSQHHGQQSGEQHSHQQPGQTEVFQDMLPMPGDPTQGTGNYNIEDFADLGMFPPFSE

SEQ ID NO: 54 - protein, 562 aa, Homo sapiens
MSNQYQEEGCSERPECKSKSPTLLSSYCIDSILGRRSPCKMRLLGAAQSLPAPLTSRADPEKAVQGSPKSSSAPFEAELHLPPKLRRLYGPGGGRLLQGAAAAAAAAAAAAAAAATATAGPRGEAPPPPPPTARPGERPDGAGAAAAAAAAAAAAWDTLKISQAPQVSISRSKSYRENGAPFVPPPPALDELGGPGGVTHPEERLGVAGGPGSAPAAGGGTGTEDDEEELLEDEEDEDEEEELLEDDEEELLEDDARALLKEPRRCPVAATGAVAAAAAAAVATEGGELSPKEELLLHPEDAEGKDGEDSVCLSAGSDSEEGLLKRKQRRYRTTFTSYQLEELERAFQKTHYPDVFTREELAMRLDLTEARVQVWFQNRRAKWRKREKAGAQTHPPGLPFPGPLSATHPLSPYLDASPFPPHHPALDSAWTAAAAAAAAAFPSLPPPPGSASLPPSGAPLGLSTFLGAAVFRHPAFISPAFGRLFSTMAPLTSASTAAALLRQPTPAVEGAVASGALADPATAAADRRASSIAALRLKAKEHAAQLTQLNILPGTSTGKEVC

SEQ ID NO: 55 - protein, 2964 aa, Homo sapiens
MDPRNTAMLGLGSDSEGFSRKSPSAISTGTLVSKREVELEKNTKEEEDLRKRNRERNIEAGKDDGLTDAQQQFSVKETNFSEGNLKLKIGLQAKRTKKPPKNLENYVCRPAIKTTIKHPRKALKSGKMTDEKNEHCPSKRDPSKLYKKADDVAAIECQSEEVIRLHSQGENNPLSKKLSPVHSEMADYINATPSTLLGSRDPDLKDRALLNGGTSVTEKLAQLIATCPPSKSSKTKPKKLGTGTTAGLVSKDLIRKAGVGSVAGIIHKDLIKKPTISTAVGLVTKDPGKKPVFNAAVGLVNKDSVKKLGTGTTAVFINKNLGKKPGTITTVGLLSKDSGKKLGIGIVPGLVHKESGKKLGLGTVVGLVNKDLGKKLGSTVGLVAKDCAKKIVASSAMGLVNKDIGKKLMSCPLAGLISKDAINLKAEALLPTQEPLKASCSTNINNQESQELSESLKDSATSKTFEKNVVRQNKESILEKFSVRKEIINLEKEMFNEGTCIQQDSFSSSEKGSYETSKHEKQPPVYCTSPDFKMGGASDVSTAKSPFSAVGESNLPSPSPTVSVNPLTRSPPETSSQLAPNPLLLSSTTELIEEISESVGKNQFTSESTHLNVGHRSVGHSISIECKGIDKEVNDSKTTHIDIPRISSSLGKKPSLTSESSIHTITPSVVNFTSLFSNKPFLKLGAVSASDKHCQVAESLSTSLQSKPLKKRKGRKPRWTKVVARSTCRSPKGLELERSELFKNVSCSSLSNSNSEPAKFMKNIGPPSFVDHDFLKRRLPKLSKSTAPSLALLADSEKPSHKSFATHKLSSSMCVSSDLLSDIYKPKRGRPKSKEMPQLEGPPKRTLKIPASKVFSLQSKEEQEPPILQPEIEIPSFKQGLSVSPFPKKRGRPKRQMRSPVKMKPPVLSVAPFVATESPSKLESESDNHRSSSDFFESEDQLQDPDDLDDSHRPSVCSMSDLEMEPDKKITKRNNGQLMKTIIRKINKMKTLKRKKLLNQILSSSVESSNKGKVQSKLHNTVSSLAATFGSKLGQQINVSKKGTIYIGKRRGRKPKTVLNGILSGSPTSLAVLEQTAQQAAGSALGQILPPLLPSSASSSEILPSPICSQSSGTSGGQSPVSSDAGFVEPSSVPYLHLHSRQGSMIQTLAMKKASKGRRRLSPPTLLPNSPSHLSELTSLKEATPSPISESHSDETIPSDSGIGTDNNSTSDRAEKFCGQKKRRHSFEHVSLIPPETSTVLSSLKEKHKHKCKRRNHDYLSYDKMKRQKRKRKKKYPQLRNRQDPDFIAELEELISRLSEIRITHRSHHFIPRDLLPTIFRINFNSFYTHPSFPLDPLHYIRKPDLKKKRGRPPKMREAMAEMPFMHSLSFPLSSTGFYPSYGMPYSPSPLTAAPIGLGYYGRYPPTLYPPPPSPSFTTPLPPPSYMHAGHLLLNPAKYHKKKHKLLRQEAFLTTSRTPLLSMSTYPSVPPEMAYGWMVEHKHRHRHKHREHRSSEQPQVSMDTGSSRSVLESLKRYRFGKDAVGERYKHKEKHRCHMSCPHLSPSKSLINREEQWVHREPSESSPLALGLQTPLQIDCSESSPSLSLGGFTPNSEPASSDEHTNLFTSAIGSCRVSNPNSSGRKKLTDSPGLFSAQDTSLNRLHRKESLPSNERAVQTLAGSQPTSDKPSQRPSESTNCSPTRKRSSSESTSSTVNGVPSRSPRLVASGDDSVDSLLQRMVQNEDQEPMEKSIDAVIATASAPPSSSPGRSHSKDRTLGKPDSLLVPAVTSDSCNNSISLLSEKLTSSCSPHHIKRSVVEAMQRQARKMCNYDKILATKKNLDHVNKILKAKKLQRQARTGNNFVKRRPGRPRKCPLQAVVSMQAFQAAQFVNPELNRDEEGAALHLSPDTVTDVIEAVVQSVNLNPEHKKGLKRKGWLLEEQTRKKQKPLPEEEEQENNKSFNEAPVEIPSPSETPAKPSEPESTLQPVLSLIPREKKPPRPPKKKYQKAGLYSDVYKTTDPKSRLIQLKKEKLEYTPGEHEYGLFPAPIHVGKYLRQKRIDFQLPYDILWQWKHNQLYKKPDVPLYKKIRSNVYVDVKPLSGYEATTCNCKKPDDDTRKGCVDDCLNRMIFAECSPNTCPCGEQCCNQRIQRHEWVQCLERFRAEEKGWGIRTKEPLKAGQFIIEYLGEVVSEQEFRNRMIEQYHNHSDHYCLNLDSGMVIDSYRMGNEARFINHSCDPNCEMQKWSVNGVYRIGLYALKDMPAGTELTYDYNFHSFNVEKQQLCKCGFEKCRGIIGGKSQRVNGLTSSKNSQPMATHKKSGRSKEKRKSKHKLKKRRGHLSEEPSENINTPTRLTPQLQMKPMSNRERNFVLKHHVFLVRNWEKIRQKQEEVKHTSDNIHSASLYTRWNGICRDDGNIKSDVFMTQFSALQTARSVRTRRLAAAEENIEVARAARLAQIFKEICDGIISYKDSSRQALAAPLLNLPPKKKNADYYEKISDPLDLITIEKQILTGYYKTVEAFDADMLKVFRNAEKYYGRKSPVGRDVCRLRKAYYNARHEASAQIDEIVGETASEADSSETSVSEKENGHEKDDDVIRCICGLYKDEGLMIQCDKCMVWQHCDCMGVNSDVEHYLCEQCDPRPVDREVPMIPRPHYAQPGCVYFICLLRDDLLLRQGDCVYLMRDSRRTPDGHPVRQSYRLLSHINRDKLDIFRIEKLWKNEKEERFAFGHHYFRPHETHHSPSRRFYHNELFRVPLYEIIPLEAVVGTCCVLDLYTYCKGRPKGVKEQDVYICDYRLDKSAHLFYKIHRNRYPVCTKPYAFDHFPKKLTPKKDFSPHYVPDNYKRNGGRSSWKSERSKPPLKDLGQEDDALPLIEEVLASQEQAANEIPSLEEPEREGATANVSEGEKKTEESSQEPQSTCTPEERRHNQRERLNQILLNLLEKIPGKNAIDVTYLLEEGSGRKLRRRTLFIPENSFRK

SEQ ID NO: 56 - protein, 373 aa, Homo sapiens
MGSSEDQAYRLLNDYANGFMVSQVLFAACELGVFDLLAEAPGPLDVAAVAAGVRASAHGTELLLDICVSLKLLKVETRGGKAFYRNTELSSDYLTTVSPTSQCSMLKYMGRTSYRCWGHLADAVREGRNQYLETFGVPAEELFTAIYRSEGERLQFMQALQEVWSVNGRSVLTAFDLSVFPLMCDLGGTWIKLETIILSKLSQGQKTKHRVFSLIGGAGALAKECMSLYPGCKITVFDIPEVVWTAKQHFSFQEEEQIDFQEGDFFKDPLPEADLYILARVLHDWADGKCSHLLERIYHTCKPGGGILVIESLLDEDRRGPLLTQLYSLNMLVQTEGQERTPTHYHMLLSSAGFRDFQFKKTGAIYDAILARK

SEQ ID NO: 57 - protein, 412 aa, Homo sapiens
MSSKGSVVLAYSGGLDTSCILVWLKEQGYDVIAYLANIGQKEDFEEARKKALKLGAKKVFIEDVSREFVEEFIWPAIQSSALYEDRYLLGTSLARPCIARKQVEIAQREGAKYVSHGATGKGNDQVRFELSCYSLAPQIKVIAPWRMPEFYNRFKGRNDLMEYAKQHGIPIPVTPKNPWSMDENLMHISYEAGILENPKNQAPPGLYTKTQDPAKAPNTPDILEIEFKKGVPVKVTNVKDGTTHQTSLELFMYLNEVAGKHGVGRIDIVENRFIGMKSRGIYETPAGTILYHAHLDIEAFTMDREVRKIKQGLGLKFAELVYTGFWHSPECEFVRHCIAKSQERVEGKVQVSVLKGQVYILGRESPLSLYNEELVSMNVQGDYEPTDATGFININSLRLKEYHRLQSKVTAK

SEQ ID NO: 58 - protein, 1288 aa, Homo sapiens
MAAAGARLSPGPGSGLRGRPRLCFHPGPPPLLPLLLLFLLLLPPPPLLAGATAAASREPDSPCRLKTVTVSTLPALRESDIGWSGARAGAGAGTGAGAAAAAASPGSPGSAGTAAESRLLLFVRNELPGRIAVQDDLDNTELPFFTLEMSGTAADISLVHWRQQWLENGTLYFHVSMSSSGQLAQATAPTLQEPSEIVEEQMHILHISVMGGLIALLLLLLVFTVALYAQRRWQKRRRIPQKSASTEATHEIHYIPSVLLGPQARESFRSSRLQTHNSVIGVPIRETPILDDYDCEEDEEPPRRANHVSREDEFGSQVTHTLDSLGHPGEEKVDFEKKGGISFGRAKGTSGSEADDETQLTFYTEQYRSRRRSKGLLKSPVNKTALTLIAVSSCILAMVCGSQMSCPLTVKVTLHVPEHFIADGSSFVVSEGSYLDISDWLNPAKLSLYYQINATSPWVRDLCGQRTTDACEQLCDPETGECSCHEGYAPDPVHRHLCVRSDWGQSEGPWPYTTLERGYDLVTGEQAPEKILRSTFSLGQGLWLPVSKSFVVPPVELSINPLASCKTDVLVTEDPADVREEAMLSTYFETINDLLSSFGPVRDCSRNNGGCTRNFKCVSDRQVDSSGCVCPEELKPMKDGSGCYDHSKGIDCSDGFNGGCEQLCLQQTLPLPYDATSSTIFMFCGCVEEYKLAPDGKSCLMLSDVCEGPKCLKPDSKFNDTLFGEMLHGYNNRTQHVNQGQVFQMTFRENNFIKDFPQLADGLLVIPLPVEEQCRGVLSEPLPDLQLLTGDIRYDEAMGYPMVQQWRVRSNLYRVKLSTITLAAGFTNVLKILTKESSREELLSFIQHYGSHYIAEALYGSELTCIIHFPSKKVQQQLWLQYQKETTELGSKKELKSMPFITYLSGLLTAQMLSDDQLISGVEIRCEEKGRCPSTCHLCRRPGKEQLSPTPVLLEINRVVPLYTLIQDNGTKEAFKSALMSSYWCSGKGDVIDDWCRCDLSAFDANGLPNCSPLLQPVLRLSPTVEPSSTVVSLEWVDVQPAIGTKVSDYILQHKKVDEYTDTDLYTGEFLSFADDLLSGLGTSCVAAGRSHGEVPEVSIYSVIFKCLEPDGLYKFTLYAVDTRGRHSELSTVTLRTACPLVDDNKAEEIADKIYNLYNGYTSGKEQQMAYNTLMEVSASMLFRVQHHYNSHYEKFGDFVWRSEDELGPRKAHLILRRLERVSSHCSSLLRSAYIQSRVETVPYLFCRSEEVRPAGMVWYSILKDTKITCEEKMVSMARNTYGESKGR

SEQ ID NO: 59 - protein, 2248 aa, Homo sapiens
MKDKRKKKDRTWAEAARLALEKHPNSPMTAKQILEVIQKEGLKETSGTSPLACLNAMLHTNTRIGDGTFFKIPGKSGLYALKKEESSCPADGTLDLVCESELDGTDMAEANAHGEENGVCSKQVTDEASSTRDSSLTNTAVQSKLVSSFQQHTKKALKQALRQQQKRRNGVSMMVNKTVPRVVLTPLKVSDEQSDSPSGSESKNGEADSSDKEMKHGQKSPTGKQTSQHLKRLKKSGLGHLKWTKAEDIDIETPGSILVNTNLRALINKHTFASLPQHFQQYLLLLLPEVDRQMGSDGILRLSTSALNNEFFAYAAQGWKQRLAEGEFTPEMQLRIRQEIEKEKKTEPWKEKFFERFYGEKLGMSREESVKLTTGPNNAGAQSSSSCGTSGLPVSAQTALAEQQPKSMKSPASPEPGFCATLCPMVEIPPKDIMAELESEDILIPEESVIQEEIAEEVETSICECQDENHKTIPEFSEEAESLTNSHEEPQIAPPEDNLESCVMMNDVLETLPHIEVKIEGKSESPQEEMTVVIDQLEVCDSLIPSTSSMTHVSDTEHKESETAVETSTPKIKTGSSSLEGQFPNEGIAIDMELQSDPEEQLSENACISETSFSSESPEGACTSLPSPGGETQSTSEESCTPASLETTFCSEVSSTENTDKYNQRNSTDENFHASLMSEISPISTSPEISEASLMSNLPLTSEASPVSNLPLTSETSPMSDLPLTSETSSVSSMLLTSETTFVSSLPLPSETSPISNSSINERMAHQQRKSPSVSEEPLSPQKDESSATAKPLGENLTSQQKNLSNTPEPIIMSSSSIAPEAFPSEDLHNKTLSQQTCKSHVDTEKPYPASIPELASTEMIKVKNHSVLQRTEKKVLPSPLELSVFSEGTDNKGNELPSAKLQDKQYISSVDKAPFSEGSRNKTHKQGSTQSRLETSHTSKSSEPSKSPDGIRNESRDSEISKRKTAEQHSFGICKEKRARIEDDQSTRNISSSSPPEKEQPPREEPRVPPLKIQLSKIGPPFIIKSQPVSKPESRASTSTSVSGGRNTGARTLADIKARAQQARAQREAAAAAAVAAAASIVSGAMGSPGEGGKTRTLAHIKEQTKAKLFAKHQARAHLFQTSKETRLPPPLSSKEGPPNLEVSSTPETKMEGSTGVIIVNPNCRSPSNKSAHLRETTTVLQQSLNPSKLPETATDLSVHSSDENIPVSHLSEKIVSSTSSENSSVPMLFNKNSVPVSVCSTAISGAIKEHPFVSSVDKSSVLMSVDSANTTISACNISMLKTIQGTDTPCIAIIPKCIESTPISATTEGSSISSSMDDKQLLISSSSASNLVSTQYTSVPTPSIGNNLPNLSTSSVLIPPMGINNRFPSEKIAIPGSEEQATVSMGTTVRAALSCSDSVAVTDSLVAHPTVAMFTGNMLTINSYDSPPKLSAESLDKNSGPRNRADNSGKPQQPPGGFAPAAINRSIPCKVIVDHSTTLTSSLSLTVSVESSEASLDLQGRPVRTEASVQPVACPQVSVISRPEPVANEGIDHSSTFIAASAAKQDSKTLPATCTSLRELPLVPDKLNEPTAPSHNFAEQARGPAPFKSEADTTCSNQYNPSNRICWNDDGMRSTGQPLVTHSGSSKQKEYLEQSCPKAIKTEHANYLNVSELHPRNLVTNVALPVKSELHEADKGFRMDTEDFPGPELPPPAAEGASSVQQTQNMKASTSSPMEEAISLATDALKRVPGAGSSGCRLSSVEANNPLVTQLLQGNLPLEKVLPQPRLGAKLEINRLPLPLQTTSVGKTAPERNVEIPPSSPNPDGKGYLAGTLAPLQMRKRENHPKKRVARTVGEHTQVKCEPGKLLVEPDVKGVPCVISSGISQLGHSQPFKQEWLNKHSMQNRIVHSPEVKQQKRLLPSCSFQQNLFHVDKNGGFHTDAGTSHRQQFYQMPVAARGPIPTAALLQASSKTPVGCNAFAFNRHLEQKGLGEVSLSSAPHQLRLANMLSPNMPMKEGDEVGGTAHTMPNKALVHPPPPPPPPPPPPLALPPPPPPPPPLPPPLPNAEVPSDQKQPPVTMETTKRLSWPQSTGICSNIKSEPLSFEEGLSSSCELGMKQVSYDQNEMKEQLKAFALKSADFSSYLLSEPQKPFTQLAAQKMQVQQQQQLCGNYPTIHFGSTSFKRAASAIEKSIGILGSGSNPATGLSGQNAQMPVQNFADSSNADELELKCSCRLKAMIVCKGCGAFCHDDCIGPSKLCVACLVVR

SEQ ID NO: 60 - protein, 703 aa, Homo sapiens
MAAATGDPGLSKLQFAPFSSALDVGFWHELTQKKLNEYRLDEAPKDIKGYYYNGDSAGLPARLTLEFSAFDMSAPTPARCCPAIGTLYNTNTLESFKTADKKLLLEQAANEIWESIKSGTALENPVLLNKFLLLTFADLKKYHFYYWFCYPALCLPESLPLIQGPVGLDQRFSLKQIEALECAYDNLCQTEGVTALPYFLIKYDENMVLVSLLKHYSDFFQGQRTKITIGVYDPCNLAQYPGWPLRNFLVLAAHRWSSSFQSVEVVCFRDRTMQGARDVAHSIIFEVKLPEMAFSPDCPKAVGWEKNQKGGMGPRMVNLSECMDPKRLAESSVDLNLKLMCWRLVPTLDLDKVVSVKCLLLGAGTLGCNVARTLMGWGVRHITFVDNAKISYSNPVRQPLYEFEDCLGGGKPKALAAADRLQKIFPGVNARGFNMSIPMPGHPVNFSSVTLEQARRDVEQLEQLIESHDVVFLLMDTRESRWLPAVIAASKRKLVINAALGFDTFVVMRHGLKKPKQQGAGDLCPNHPVASADLLGSSLFANIPGYKLGCYFCNDVVAPGDSTRDRTLDQQCTVSRPGLAVIAGALAVELMVSVLQHPEGGYAIASSSDDRMNEPPTSLGLVPHQIRGFLSRFDNVLPVSLAFDKCTACSSKVLDQYEREGFNFLAKVFNSSHSFLEDLTGLTLLHQETQAAEIWDMSDDETI

SEQ ID NO: 61 - protein, 1499 aa, Homo sapiens
MEREPAGTEEPGPPGRRRRREGRTRTVRSNLLPPPGAEDPAAGAAKGERRRRRGCAQHLADNRLKTTKYTLLSFLPKNLFEQFHRPANVYFVFIALLNFVPAVNAFQPGLALAPVLFILAITAFRDLWEDYSRHRSDHKINHLGCLVFSREEKKYVNRFWKEIHVGDFVRLRCNEIFPADILLLSSSDPDGLCHIETANLDGETNLKRRQVVRGFSELVSEFNPLTFTSVIECEKPNNDLSRFRGCIIHDNGKKAGLYKENLLLRGCTLRNTDAVVGIVIYAGHETKALLNNSGPRYKRSKLERQMNCDVLWCVLLLVCMSLFSAVGHGLWIWRYQEKKSLFYVPKSDGSSLSPVTAAVYSFLTMIIVLQVLIPISLYVSIEIVKACQVYFINQDMQLYDEETDSQLQCRALNITEDLGQIQYIFSDKTGTLTENKMVFRRCTVSGVEYSHDANAQRLARYQEADSEEEEVVPRGGSVSQRGSIGSHQSVRVVHRTQSTKSHRRTGSRAEAKRASMLSKHTAFSSPMEKDITPDPKLLEKVSECDKSLAVARHQEHLLAHLSPELSDVFDFFIALTICNTVVVTSPDQPRTKVRVRFELKSPVKTIEDFLRRFTPSCLTSGCSSIGSLAANKSSHKLGSSFPSTPSSDGMLLRLEERLGQPTSAIASNGYSSQADNWASELAQEQESERELRYEAESPDEAALVYAARAYNCVLVERLHDQVSVELPHLGRLTFELLHTLGFDSVRKRMSVVIRHPLTDEINVYTKGADSVVMDLLQPCSSVDARGRHQKKIRSKTQNYLNVYAAEGLRTLCIAKRVLSKEEYACWLQSHLEAESSLENSEELLFQSAIRLETNLHLLGATGIEDRLQDGVPETISKLRQAGLQIWVLTGDKQETAVNIAYACKLLDHDEEVITLNATSQEACAALLDQCLCYVQSRGLQRAPEKTKGKVSMRFSSLCPPSTSTASGRRPSLVIDGRSLAYALEKNLEDKFLFLAKQCRSVLCCRSTPLQKSMVVKLVRSKLKAMTLAIGDGANDVSMIQVADVGVGISGQEGMQAVMASDFAVPKFRYLERLLILHGHWCYSRLANMVLYFFYKNTMFVGLLFWFQFFCGFSASTMIDQWYLIFFNLLFSSLPPLVTGVLDRDVPANVLLTNPQLYKSGQNMEEYRPRTFWFNMADAAFQSLVCFSIPYLAYYDSNVDLFTWGTPIVTIALLTFLLHLGIETKTWTWLNWITCGFSVLLFFTVALIYNASCATCYPPSNPYWTMQALLGDPVFYLTCLMTPVAALLPRLFFRSLQGRVFPTQLQLARQLTRKSPRRCSAPKETFAQGRLPKDSGTEHSSGRTVKTSVPLSQPSWHTQQPVCSLEASGEPSTVDMSMPVREHTLLEGLSAPAPMSSAPGEAVLRSPGGCPEESKVRAASTGRVTPLSSLFSLPTFSLLNWISSWSLVSRLGSVLQFSRTEQLADGQAGRGLPVQPHSGRSGLQGPDHRLLIGASSRRSQ

SEQ ID NO: 62 - protein, 1026 aa, Homo sapiens
MGSGGSDSYRIATSQDKKDDKDSPKKNKGKERRDLDDLKKEVAMTEHKMSVEEVCRKYNTDCVQGLTHSKAQEILARDGPNALTPPPTTPEWVKFCRQLFGGFSILLWIGAILCFLAYGIQAGTEDDPSGDNLYLGIVLAAVVIITGCFSYYQEAKSSKIMESFKNMVPQQALVIREGEKMQVNAEEVVVGDLVEIKGGDRVPADLRIISAHGCKVDNSSLTGESEPQTRSPDCTHDNPLETRNITFFSTNCVEGTARGVVVATGDRTVMGRIATLASGLEVGKTPIAIEIEHFIQLITGVAVFLGVSFFILSLILGYTWLEAVIFLIGIIVANVPEGLLATVTVCLTLTAKRMARKNCLVKNLEAVETLGSTSTICSDKTGTLTQNRMTVAHMWFDNQIHEADTTEDQSGTSFDKSSHTWVALSHIAGLCNRAVFKGGQDNIPVLKRDVAGDASESALLKCIELSSGSVKLMRERNKKVAEIPFNSTNKYQLSIHETEDPNDNRYLLVMKGAPERILDRCSTILLQGKEQPLDEEMKEAFQNAYLELGGLGERVLGFCHYYLPEEQFPKGFAFDCDDVNFTTDNLCFVGLMSMIDPPRAAVPDAVGKCRSAGIKVIMVTGDHPITAKAIAKGVGIISEGNETVEDIAARLNIPVSQVNPRDAKACVIHGTDLKDFTSEQIDEILQNHTEIVFARTSPQQKLIIVEGCQRQGAIVAVTGDGVNDSPALKKADIGVAMGIAGSDVSKQAADMILLDDNFASIVTGVEEGRLIFDNLKKSIAYTLTSNIPEITPFLLFIMANIPLPLGTITILCIDLGTDMVPAISLAYEAAESDIMKRQPRNPRTDKLVNERLISMAYGQIGMIQALGGFFSYFVILAENGFLPGNLVGIRLNWDDRTVNDLEDSYGQQWTYEQRKVVEFTCHTAFFVSIVVVQWADLIICKTRRNSVFQQGMKNKILIFGLFEETALAAFLSYCPGMDVALRMYPLKPSWWFCAFPYSFLIFVYDEIRKLILRRNPGGWVEKETYY

SEQ ID NO: 63 - protein, 1243 aa, Homo sapiens [sequence omitted]

SEQ ID NO: 64 - protein, 1164 aa, Homo sapiens
MPTMRRTVSEIRSRAEGYEKTDDVSEKTSLADQEEVRTIFINQPQLTKFCNNHVSTAKYNIITFLPRFLYSQFRRAANSFFLFIALLQQIPDVSPTGRYTTLVPLLFILAVAAIKEIIEDIKRHKADNAVNKKQTQVLRNGAWEIVHWEKVAVGEIVKVTNGEHLPADLISLSSSEPQAMCYIETSNLDGETNLKIRQGLPATSDIKDVDSLMRISGRIECESPNRHLYDFVGNIRLDGHGTVPLGADQILLRGAQLRNTQWVHGIVVYTGHDTKLMQNSTSPPLKLSNVERITNVQILILFCILIAMSLVCSVGSAIWNRRHSGKDWYLNLNYGGASNFGLNFLTFIILFNNLIPISLLVTLEVVKFTQAYFINWDLDMHYEPTDTAAMARTSNLNEELGQVKYIFSDKTGTLTCNVMQFKKCTIAGVAYGHVPEPEDYGCSPDEWQNSQFGDEKTFSDSSLLENLQNNHPTAPIICEFLTMMAVCHTAVPEREGDKIIYQAASPDEGALVRAAKQLNFVFTGRTPDSVIIDSLGQEERYELLNVLEFTSARKRMSVIVRTPSGKLRLYCKGADTVIYDRLAETSKYKEITLKHLEQFATEGLRTLCFAVAEISESDFQEWRAVYQRASTSVQNRLLKLEESYELIEKNLQLLGATAIEDKLQDQVPETIETLMKADIKIWILTGDKQETAINIGHSCKLLKKNMGMIVINEGSLDGTRETLSRHCTTLGDALRKENDFALIIDGKTLKYALTFGVRQYFLDLALSCKAVICCRVSPLQKSEVVEMVKKQVKVVTLAIGDGANDVSMIQTAHVGVGISGNEGLQAANSSDYSIAQFKYLKNLLMIHGAWNYNRVSKCILYCFYKNIVLYIIEIWFAFVNGFSGQILFERWCIGLYNVMFTAMPPLTLGIFERSCRKENMLKYPELYKTSQNALDFNTKVFWVHCLNGLFHSVILFWFPLKALQYGTAFGNGKTSDYLLLGNFVYTFVVITVCLKAGLETSYWTWFSHIAIWGSIALWVVFFGIYSSLWPAIPMAPDMSGEAAMLFSSGVFWMGLLFIPVASLLLDVVYKVIKRTAFKTLVDEVQELEAKSQDPGAVVLGKSLTERAQLLKNVFKKNHVNLYRSESLQQNLLHGYAFSQDENGIVSQSEVIRAYDTTKQRPDEW

SEQ ID NO: 65 - protein, 1379 aa, Homo sapiens
METGGRARTGTPQPAAPGVWRARPAGGGGGGASSWLLDGNSWLLCYGFLYLALYAQVSQSKPCERTGSCFSGRCVNSTCLCDPGWVGDQCQHCQGRFKLTEPSGYLTDGPINYKYKTKCTWLIEGYPNAVLRLRFNHFATECSWDHMYVYDGDSIYAPLIAVLSGLIVPEIRGNETVPEVVTTSGYALLHFFSDAAYNLTGFNIFYSINSCPNNCSGHGKCTTSVSVPSQVYCECDKYWKGEACDIPYCKANCGSPDHGYCDLTGEKLCVCNDSWQGPDCSLNVPSTESYWILPNVKPFSPSVGRASHKAVLHGKFMWVIGGYTFNYSSFQMVLNYNLESSIWNVGTPSRGPLQRYGHSLALYQENIFMYGGRIETNDGNVTDELWVFNIHSQSWSTKTPTVLGHGQQYAVEGHSAHIMELDSRDVVMIIIFGYSAIYGYTSSIQEYHISSNTWLVPETKGAIVQGGYGHTSVYDEITKSIYVHGGYKALPGNKYGLVDDLYKYEVNTKTWTILKESGFARYLHSAVLINGAMLIFGGNTHNDTSLSNGAKCFSADFLAYDIACDEWKILPKPNLHRDVNRFGHSAVVINGSMYIFGGFSSVLLNDILVYKPPNCKAFRDEELCKNAGPGIKCVWNKNHCESWESGNTNNILRAKCPPKTAASDDRCYRYADCASCTANTNGCQWCDDKKCISANSNCSMSVKNYTKCHVRNEQICNKLTSCKSCSLNLNCQWDQRQQECQALPAHLCGEGWSHIGDACLRVNSSRENYDNAKLYCYNLSGNLASLTTSKEVEFVLDEIQKYTQQKVSPWVGLRKINISYWGWEDMSPFTNTTLQWLPGEPNDSGFCAYLERAAVAGLKANPCTSMANGLVCEKPVVSPNQNARPCKKPCSLRTSCSNCTSNGMECMWCSSTKRCVDSNAYIISFPYGQCLEWQTATCSPQNCSGLRTCGQCLEQPGCGWCNDPSNTGRGHCIEGSSRGPMKLIGMHHSEMVLDTNLCPKEKNYEWSFIQCPACQCNGHSTCINNNVCEQCKNLTTGKQCQDCMPGYYGDPTNGGQCTACTCSGHANICHLHTGKCFCTTKGIKGDQCQLCDSENRYVGNPLRGTCYYSLLIDYQFTFSLLQEDDRHHTAINFIANPEQSNKNLDISINASNNFNLNITWSVGSTAGTISGEETSIVSKNNIKEYRDSFSYEKFNFRSNPNITFYVYVSNFSWPIKIQIAFSQHNTIMDLVQFFVTFFSCFLSLLLVAAVVWKIKQTCWASRRREQLLRERQQMASRPFASVDVALEVGAEQTEFLRGPLEGAPKPIAIEPCAGNRAAVLTVFLCLPRGSSGAPPPGQSGLAIASALIDISQQKASDSKDKTSGVRNRKHLSTRQGTCV

SEQ ID NO: 66 - protein, 2492 aa, Homo sapiens
MTAEPMSESKLNTLVQKLHDFLAHSSEESEETSSPPRLAMNQNTDKISGSGSNSDMMENSKEEGTSSSEKSKSSGSSRSKRKPSIVTKYVESDDEKPLDDETVNEDASNENSENDITMQSLPKGTVIVQPEPVLNEDKDDFKGPEFRSRSKMKTENLKKRGEDGLHGIVSCTACGQQVNHFQKDSIYRHPSLQVLICKNCFKYYMSDDISRDSDGMDEQCRWCAEGGNLICCDFCHNAFCKKCILRNLGRKELSTIMDENNQWYCYICHPEPLLDLVTACNSVFENLEQLLQQNKKKIKVDSEKSNKVYEHTSRFSPKKTSSNCNGEEKKLDDSCSGSVTYSYSALIVPKEMIKKAKKLIETTANMNSSYVKFLKQATDNSEISSATKLRQLKAFKSVLADIKKAHLALEEDLNSEFRAMDAVNKEKNTKEHKVIDAKFETKARKGEKPCALEKKDISKSEAKLSRKQVDSEHMHQNVPTEEQRTNKSTGGEHKKSDRKEEPQYEPANTSEDLDMDIVSVPSSVPEDIFENLETAMEVQSSVDHQGDGSSGTEQEVESSSVKLNISSKDNRGGIKSKTTAKVTKELYVKLTPVSLSNSPIKGADCQEVPQDKDGYKSCGLNPKLEKCGLGQENSDNEHLVENEVSLLLEESDLRRSPRVKTTPLRRPTETNPVTSNSDEECNETVKEKQKLSVPVRKKDKRNSSDSAIDNPKPNKLPKSKQSETVDQNSDSDEMLAILKEVSRMSHSSSSDTDINEIHTNHKTLYDLKTQAGKDDKGKRKRKSSTSGSDFDTKKGKSAKSSIISKKKRQTQSESSNYDSELEKEIKSMSKIGAARTTKKRIPNTKDFDSSEDEKHSKKGMDNQGHKNLKTSQEGSSDDAERKQERETFSSAEGTVDKDTTIMELRDRLPKKQQASASTDGVDKLSGKEESFTSLEVRKVAETKEKSKHLKTKTCKKVQDGLSDIAEKFLKKDQSDETSEDDKKQSKKGTEEKKKPSDFKKKVIKMEQQYESSSDGTEKLPEREEICHFPKGIKQIKNGTTDGEKKSKKIRDKTSKKKDELSDYAEKSTGKGDSCDSSEDKKSKNGAYGREKKRCKLLGKSSRKRQDCSSSDTEKYSMKEDGCNSSDKRLKRIELRERRNLSSKRNTKEIQSGSSSSDAEESSEDNKKKKQRTSSKKKAVIVKEKKRNSLRTSTKRKQADITSSSSSDIEDDDQNSIGEGSSDEQKIKPVTENLVLSSHTGFCQSSGDEALSKSVPVTVDDDDDDNDPENRIAKKMLLEEIKANLSSDEDGSSDDEPEEGKKRTGKQNEENPGDEEAKNQVNSESDSDSEESKKPRYRHRLLRHKLTVSDGESGEEKKTKPKEHKEVKGRNRRKVSSEDSEDSDFQESGVSEEVSESEDEQRPRTRSAKKAELEENQRSYKQKKKRRRIKVQEDSSSENKSNSEEEEEEKEEEEEEEEEEEEEEEDENDDSKSPGKGRKKIRKILKDDKLRTETQNALKEEEERRKRIAEREREREKLREVIEIEDASPTKCPITTKLVLDEDEETKEPLVQVHRNMVIKLKPHQVDGVQFMWDCCCESVKKTKKSPGSGCILAHCMGLGKTLQVVSFLHTVLLCDKLDFSTALVVCPLNTALNWMNEFEKWQEGLKDDEKLEVSELATVKRPQERSYMLQRWQEDGGVMIIGYEMYRNLAQGRNVKSRKLKEIFNKALVDPGPDFVVCDEGHILKNEASAVSKAMNSIRSRRRIILTGTPLQNNLIEYHCMVNFIKENLLGSIKEFRNRFINPIQNGQCADSTMVDVRVMKKRAHILYEMLAGCVQRKDYTALTKFLPPKHEYVLAVRMTSIQCKLYQYYLDHLTGVGNNSEGGRGKAGAKLFQDFQMLSRIWTHPWCLQLDYISKENKGYFDEDSMDEFIASDSDETSMSLSSDDYTKKKKKGKKGKKDSSSSGSGSDNDVEVIKVWNSRSRGGGEGNVDETGNNPSVSLKLEESKATSSSNPSSPAPDWYKDFVTDADAEVLEHSGKMVLLFEILRMAEEIGDKVLVFSQSLISLDLIEDFLELASREKTEDKDKPLIYKGEGKWLRNIDYYRLDGSTTAQSRKKWAEEFNDETNVRGRLFIISTKAGSLGINLVAANRVIIFDASWNPSYDIQSIFRVYRFGQTKPVYVYRFLAQGTMEDKIYDRQVTKQSLSFRVVDQQQVERHFTMNELTELYTFEPDLLDDPNSEKKKKRDTPMLPKDTILAELLQIHKEHIVGYHEHDSLLDHKEEEELTEEERKAAWAEYEAEKKGLTMRFNIPTGTNLPPVSFNSQTPYIPFNLGALSAMSNQQLEDLINQGREKVVEATNSVTAVRIQPLEDIISAVWKENMNLSEAQVQALALSRQASQELDVKRREAIYNDVLTKQQMLISCVQRILMNRRLQQQYNQQQQQQMTYQQATLGHLMMPKPPNLIMNPSNYQQIDMRGMYQPVAGGMQPPPLQRAPPPMRSKNPGPSQGKSM

SEQ ID NO: 67 - protein, 945 aa, Homo sapiens
MSERAADDVRGEPRRAAAAAGGAAAAAARQQQQQQQQQQPPPPQPQRQQHPPPPPRRTRPEDGGPGAASTSAAAMATVGERRPLPSPEVMLGQSWNLWVEASKLPGKDGTELDESFKEFGKNREVMGLCREDMPIFGFCPAHDDFYLVVCNDCNQVVKPQAFQSHYERRHSSSSKPPLAVPPTSVFSFFPSLSKSKGGSASGSNRSSSGGVLSASSSSSKLLKSPKEKLQLRGNTRPMHPIQQSRVPHGRIMTPSVKVEKIHPKMDGTLLKSAVGPTCPATVSSLVKPGLNCPSIPKPTLPSPGQILNGKGLPAPPTLEKKPEDNSNNRKFLNKRLSEREFDPDIHCGVIDLDTKKPCTRSLTCKTHSLTQRRAVQGRRKRFDVLLAEHKNKTREKELIRHPDSQQPPQPLRDPHPAPPRTSQEPHQNPHGVIPSESKPFVASKPKPHTPSLPRPPGCPAQQGGSAPIDPPPVHESPHPPLPATEPASRLSSEEGEGDDKEESVEKLDCHYSGHHPQPASFCTFGSRQIGRGYYVFDSRWNRLRCALNLMVEKHLNAQLWKKIPPVPSTTSPISTRIPHRTNSVPTSQCGVSYLAAATVSTSPVLLSSTCISPNSKSVPAHGTTLNAQPAASGAMDPVCSMQSRQVSSSSSSPSTPSGLSSVPSSPMSRKPQKLKSSKSLRPKESSGNSTNCQNASSSTSGGSGKKRKNSSPLLVHSSSSSSSSSSSSHSMESFRKNCVAHSGPPYPSTVTSSHSIGLNCVTNKANAVNVRHDQSGRGPPTGSPAESIKRMSVMVNSSDSTLSLGPFIHQSNELPVNSHGSFSHSHTPLDKLIGKKRKCSPSSSSINNSSSKPTKVAKVPAVNNVHMKHTGTIPGAQGLMNSSLLHQDISSPCLRTGISATSPQSPDLKSKGTSLTAENSTGRNNADTFEDKLHLHSALWTPRCL

SEQ ID NO: 68 - protein, 1259 aa, Homo sapiens
MDGPTRGHGLRKKRRSRSQRDRERRSRGGLGAGAAGGGGAGRTRALSLASSSGSDKEDNGKPPSSAPSRPRPPRRKRRESTSAEEDIIDGFAMTSFVTFEALEKDVALKPQERVEKRQTPLTKKKREALTNGLSFHSKKSRLSHPHHYSSDRENDRNLCQHLGKRKKMPKALRQLKPGQNSCRDSDSESASGESKGFHRSSSRERLSDSSAPSSLGTGYFCDSDSDQEEKASDASSEKLFNTVIVNKDPELGVGTLPEHDSQDAGPIVPKISGLERSQEKSQDCCKEPIFEPVVLKDPCPQVAQPIPQPQTEPQLRAPSPDPDLVQRTEAPPQPPPLSTQPPQGPPEAQLQPAPQPQVQRPPRPQSPTQLLHQNLPPVQAHPSAQSLSQPLSAYNSSSLSLNSLSSSRSSTPAKTQPAPPHISHHPSASPFPLSLPNHSPLHSFTPTLQPPAHSHHPNMFAPPTALPPPPPLTSGSLQVAGHPAGSTYSEQDILRQELNTRFLASQSADRGASLGPPPYLRTEFHQHQHQHQHTHQHTHQHTFTPFPHAIPPTAIMPTPAPPMFDKYPTKVDPFYRHSLFHSYPPAVSGIPPMIPPTGPFGSLQGAFQPKTSNPIDVAARPGTVPHTLLQKDPRLTDPFRPMLRKPGKWCAMHVHIAWQIYHHQQKVKKQMQSDPHKLDFGLKPEFLSRPPGPSLFGAIHHPHDLARPSTLFSAAGAAHPTGTPFGPPPHHSNFLNPAAHLEPFNRPSTFTGLAAVGGNAFGGLGNPSVTPNSMFGHKDGPSVQNFSNPHEPWNRLHRTPPSFPTPPPWLKPGELERSASAAAHDRDRDVDKRDSSVSKDDKERESVEKRHSSHPSPAPVLPVNALGHTRSSTEQIRAHLNTEAREKDKPKERERDHSESRKDLAADEHKAKEGHLPEKDGHGHEGRAAGEEAKQLARVPSPYVRTPVVESARPNSTSSREAEPRKGEPAYENPKKSSEVKVKEERKEDHDLPPEAPQTHRASEPPPPNSSSSVHPGPLASMPMTVGVTGIHPMNSISSLDRTRMMTPFMGISPLPGGERFPYPSFHWDPIRDPLRDPYRELDIHRRDPLGRDFLLRNDPLHRLSTPRLYEADRSFRDREPHDYSHHHHHHHHPLSVDPRREHERGGHLDERERLHMLREDYEHTRLHSVHPASLDGHLPHPSLITPGLPSMHYPRISPTAGNQNGLLNKTPPTAALSAPPPLISTLGGRPVSPRRTTPLSAEIRERPPSHTLKDIEAR

SEQ ID NO: 69 - protein, 164 aa, Homo sapiens
MPDTMLPACFLGLLAFSSACYFQNCPRGGKRAMSDLELRQCLPCGPGGKGRCFGPSICCADELGCFVGTAEALRCQEENYLPSPCQSGQKACGSGGRCAAFGVCCNDESCVTEPECREGFHRRARASDRSNATQLDGPAGALLLRLVQLAGAPEPFEPAQPDAY

SEQ ID NO: 70 - protein, 418 aa, Homo sapiens
MRLSAGPDAGPSGNSSPWWPLATGAGNTSREAEALGEGNGPPRDVRNEELAKLEIAVLAVTFAVAVLGNSSVLLALHRTPRKTSRMHLFIRHLSLADLAVAFFQVLPQMCWDITYRFRGPDWLCRVVKHLQVFGMFASAYMLVVMTADRYIAVCHPLKTLQQPARRSRLMIAAAWVLSFVLSTPQYFVFSMIEVNNVTKARDCWATFIQPWGSRAYVTWMTGGIFVAPVVILGTCYGFICYNIWCNVRGKTASRQSKGAEQAGVAFQKGFLLAPCVSSVKSISRAKIRTVKMTFVIVTAYIVCWAPFFIIQMWSVWDPMSVWTESENPTITITALLGSLNSCCNPWIYMFFSGHLLQDCVQSFPCCQNMKEKFNKEDTDSMSRRQTFYSNNRSPTNSTGMWKDSPKSSKSIKFIPVST

SEQ ID NO: 71 - protein, 424 aa, Homo sapiens
MDSGPLWDANPTPRGTLSAPNATTPWLGRDEELAKVEIGVLATVLVLATGGNLAVLLTLGQLGRKRSRMHLFVLHLALTDLAVALFQVLPQLLWDITYRFQGPDLLCRAVKYLQVLSMFASTYMLLAMTLDRYLAVCHPLRSLQQPGQSTYLLIAAPWLLAAIFSLPQVFIFSLREVIQGSGVLDCWADFGFPWGPRAYLTWTTLAIFVLPVTMLTACYSLICHEICKNLKVKTQAWRVGGGGWRTWDRPSPSTLAATTRGLPSRVSSINTISRAKIRTVKMTFVIVLAYIACWAPFFSVQMWSVWDKNAPDEDSTNVAFTISMLLGNLNSCCNPWIYMGFNSHLLPRPLRHLACCGGPQPRMRRRLSDGSLSSRHTTLLTRSSCPATLSLSLSLTLSGRPRPEESPRDLELADGEGTAETIIF

SEQ ID NO: 72 - protein, 552 aa, Homo sapiens
MSLSRSEEMHRLTENVYKTIMEQFNPSLRNFIAMGKNYEKALAGVTYAAKGYFDALVKMGELASESQGSKELGDVLFQMAEVHRQIQNQLEEMLKSFHNELLTQLEQKVELDSRYLSAALKKYQTEQRSKGDALDKCQAELKKLRKKSQGSKNPQKYSDKELQYIDAISNKQGELENYVSDGYKTALTEERRRFCFLVEKQCAVAKNSAAYHSKGKELLAQKLPLWQQACADPSKIPERAVQLMQQVASNGATLPSALSASKSNLVISDPIPGAKPLPVPPELAPFVGRMSAQESTPIMNGVTGPDGEDYSPWADRKAAQPKSLSPPQSQSKLSDSYSNTLPVRKSVTPKNSYATTENKTLPRSSSMAAGLERNGRMRVKAIFSHAAGDNSTLLSFKEGDLITLLVPEARDGWHYGESEKTKMRGWFPFSYTRVLDSDGSDRLHMSLQQGKSSSTGNLLDKDDLAIPPPDYGAASRAFPAQTASGFKQRPYSVAVPAFSQGLDDYGARSMSRNPFAHVQLKPTVTNDRCDLSAQGPEGREHGDGSARTLAGR

SEQ ID NO: 73 - protein, 519 aa, Homo sapiens
MAEERVATRTQFPVSTESQKPRQKKAPEFPILEKQNWLIHLHYIRKDYEACKAVIKEQLQETQGLCEYAIYVQALIFRLEGNIQESLELFQTCAVLSPQSADNLKQVARSLFLLGKHKAAIEVYNEAAKLNQKDWEISHNLGVCYIYLKQFNKAQDQLHNALNLNRHDLTYIMLGKIHLLEGDLDKAIEVYKKAVEFSPENTELLTTLGLLYLQLGIYQKAFEHLGNALTYDPTNYKAILAAGSMMQTHGDFDVALTKYRVVACAVPESPPLWNNIGMCFFGKKKYVAAISCLKRANYLAPFDWKILYNLGLVHLTMQQYASAFHFLSAAINFQPKMGELYMLLAVALTNLEDIENAKRAYAEAVHLDKCNPLVNLNYAVLLYNQGEKKNALAQYQEMEKKVSLLKDNSSLEFDSEMVEMAQKLGAALQVGEALVWTKPVKDPKSKHQTTSTSKPASFQQPLGSNQALGQAMSSAAAYRTLPSGAGGTSQFTKPPSLPLEPEPAVESSPTETSEQIREK

SEQ ID NO: 74 - protein, 584 aa, Homo sapiens
MGNQMSVPQRVEDQENEPEAETYQDNASALNGVPVVVSTHTVQHLEEVDLGISVKTDNVATSSPETTEISAVADANGKNLGKEAKPEAPAAKSRFFLMLSRPVPGRTGDQAADSSLGSVKLDVSSNKAPANKDPSESWTLPVAAGPGQDTDKTPGHAPAQDKVLSAARDPTLLPPETGGAGGEAPSKPKDSSFFDKFFKLDKGQEKVPGDSQQEAKRAEHQDKVDEVPGLSGQSDDVPAGKDIVDGKEKEGQELGTADCSVPGDPEGLETAKDDSQAAAIAENNNSIMSFFKTLVSPNKAETKKDPEDTGAEKSPTTSADLKSDKANFTSQETQGAGKNSKGCNPSGHTQSVTTPEPAKEGTKEKSGPTSLPLGKLFWKKSVKEDSVPTGAEENVVCESPVEIIKSKEVESALQTVDLNEGDAAPEPTEAKLKREESKPRTSLMAFLRQMSVKGDGGITHSEEINGKDSSCQTSDSTEKTITPPEPEPTGAPQKGKEGSSKDKKSAAEMNKQKSNKQEAKEPAQCTEQATVDTNSLQNGDKLQKRPEKRQQSLGGFFKGLGPKRMLDAQVQTDPVSIGPVGKSK

SEQ ID NO: 75 - protein, 412 aa, Homo sapiens
MILASVLRSGPGGGLPLRPLLGPALALRARSTSATDTHHVEMARERSKTVTSFYNQSAIDAAAEKPSVRLTPTMMLYAGRSQDGSHLLKSARYLQQELPVRIAHRIKGFRCLPFIIGCNPTILHVHELYIRAFQKLTDFPPIKDQADEAQYCQLVRQLLDDHKDVVTLLAEGLRESRKHIEDEKLVRYFLDKTLTSRLGIRMLATHHLALHEDKPDFVGIICTRLSPKKIIEKWVDFARRLCEHKYGNAPRVRINGHVAARFPFIPMPLDYILPELLKNAMRATMESHLDTPYNVPDVVITIANNDVDLIIRISDRGGGIAHKDLDRVMDYHFTTAEASTQDPRISPLFGHLDMHSGAQSGPMHGFGFGLPTSRAYAEYLGGSLQLQSLQGIGTDVYLRLRHIDGREESFRI

SEQ ID NO: 76 - protein, 835 aa, Homo sapiens
MSRRKQGKPQHLSKREFSPEPLEAILTDDEPDHGPLGAPEGDHDLLTCGQCQMNFPLGDILIFIEHKRKQCNGSLCLEKAVDKPPSPSPIEMKKASNPVEVGIQVTPEDDDCLSTSSRGICPKQEHIADKLLHWRGLSSPRSAHGALIPTPGMSAEYAPQGICKDEPSSYTCTTCKQPFTSAWFLLQHAQNTHGLRIYLESEHGSPLTPRVGIPSGLGAECPSQPPLHGIHIADNNPFNLLRIPGSVSREASGLAEGRFPPTPPLFSPPPRHHLDPHRIERLGAEEMALATHHPSAFDRVLRLNPMAMEPPAMDFSRRLRELAGNTSSPPLSPGRPSPMQRLLQPFQPGSKPPFLATPPLPPLQSAPPPSQPPVKSKSCEFCGKTFKFQSNLVVHRRSHTGEKPYKCNLCDHACTQASKLKRHMKTHMHKSSPMTVKSDDGLSTASSPEPGTSDLVGSASSALKSVVAKFKSENDPNLIPENGDEEEEEDDEEEEEEEEEEEEELTESERVDYGFGLSLEAARHHENSSRGAVVGVGDESRALPDVMQGMVLSSMQHFSEAFHQVLGEKHKRGHLAEAEGHRDTCDEDSVAGESDRIDDGTVNGRGCSPGESASGGLSKKLLLGSPSSLSPFSKRIKLEKEFDLPPAAMPNTENVYSQWLAGYAASRQLKDPFLSFGDSRQSPFASSSEHSSENGSLRFSTPPGELDGGISGRSGTGSGGSTPHISGPGPGRPSSKEGRRSDTCEYCGKVFKNCSNLTVHRRSHTGERPYKCELCNYACAQSSKLTRHMKTHGQVGKDVYKCEICKMPFSVYSTLEKHMKKWHSDRVLNNDIKTE

SEQ ID NO: 77 - protein, 239 aa, Homo sapiens
MAHAGRTGYDNREIVMKYIHYKLSQRGYEWDAGDVGAAPPGAAPAPGIFSSQPGHTPHPAASRDPVARTSPLQTPAAPGAAAGPALSPVPPVVHLTLRQAGDDFSRRYRRDFAEMSSQLHLTPFTARGRFATVVEELFRDGVNWGRIVAFFEFGGVMCVESVNREMSPLVDNIALWMTEYLNRHLHTWIQDNGGWDAFVELYGPSMRPLFDFSWLSLKTLLSLALVGACITLGAYLGHK

SEQ ID NO: 78 - protein, 329 aa, Homo sapiens
MCGATSFLHECTRLILVTTQNAEFLQKGLQVHTCFGVYPHASVWHDCASQKKGCAVYLHVSVEFNKLIPENGFIKFHQVRRVMTILFLTMVISYFGCMKAAPMKEANIRGQGGLAYPGVRTHGTLESVNGPKAGSRGLTSLADTFEHVIEELLDEDQKVRPNEENNKDADLYTSRVMLSSQVPLEPPLLFLLEEYKNYLDAANMSMRVRRHSDPARRGELSVCDSISEWVTAADKKTAVDMSGGTVTVLEKVPVSKGQLKQYFYETKCNPMGYTKEGCRGIDKRHWNSQCRTTQSYVRALTMDSKKRIGWRFIRIDTSCVCTLTIKRGR

SEQ ID NO: 79 - protein, 593 aa, Homo sapiens
MAEMGSKGVTAGKIASNVQKKLTRAQEKVLQKLGKADETKDEQFEQCVQNFNKQLTEGTRLQKDLRTYLASVKAMHEASKKLNECLQEVYEPDWPGRDEANKIAENNDLLWMDYHQKLVDQALLTMDTYLGQFPDIKSRIAKRGRKLVDYDSARHHYESLQTAKKKDEAKIAKPVSLLEKAAPQWCQGKLQAHLVAQTNLLRNQAEEELIKAQKVFEEMNVDLQEELPSLWNSRVGFYVNTFQSIAGLEENFHKEMSKLNQNLNDVLVGLEKQHGSNTFTVKAQPSDNAPAKGNKSPSPPDGSPAATPEIRVNHEPEPAGGATPGATLPKSPSQLRKGPPVPPPPKHTPSKEVKQEQILSLFEDTFVPEISVTTPSQFEAPGPFSEQASLLDLDFDPLPPVTSPVKAPTPSGQSIPWDLWEPTESPAGSLPSGEPSAAEGTFAVSWPSQTAEPGPAQPAEASEVAGGTQPAAGAQEPGETAASEAASSSLPAVVVETFPATVNGTVEGGSGAGRLDLPPGFMFKVQAQHDYTATDTDELQLKAGDVVLVIPFQNPEEQDEGWLMGVKESDWNQHKELEKCRGVFPENFTERVP

SEQ ID NO: 80 - protein, 4857 aa, Homo sapiens
MVTGGGAAPPGTVTEPLPSVIVLSAGRKMAAAAAAASGPGCSSAAGAGAAGVSEWLVLRDGCMHCDADGLHSLSYHPALNAILAVTSRGTIKVIDGTSGATLQASALSAKPGGQVKCQYISAVDKVIFVDDYAVGCRKDLNGILLLDTALQTPVSKQDDVVQLELPVTEAQQLLSACLEKVDISSTEGYDLFITQLKDGLKNTSHETAANHKVAKWATVTFHLPHHVLKSIASAIVNELKKINQNVAALPVASSVMDRLSYLLPSARPELGVGPGRSVDRSLMYSEANRRETFTSWPHVGYRWAQPDPMAQAGFYHQPASSGDDRAMCFTCSVCLVCWEPTDEPWSEHERHSPNCPFVKGEHTQNVPLSVTLATSPAQFPCTDGTDRISCFGSGSCPHFLAAATKRGKICIWDVSKLMKVHLKFEINAYDPAIVQQLILSGDPSSGVDSRRPTLAWLEDSSSCSDIPKLEGDSDDLLEDSDSEEHSRSDSVTGHTSQKEAMEVSLDITALSILQQPEKLQWEIVANVLEDTVKDLEELGANPCLTNSKSEKTKEKHQEQHNIPFPCLLAGGLLTYKSPATSPISSNSHRSLDGLSRTQGESISEQGSTDNESCTNSELNSPLVRRTLPVLLLYSIKESDEKAGKIFSQMNNIMSKSLHDDGFTVPQIIEMELDSQEQLLLQDPPVTYIQQFADAAANLTSPDSEKWNSVFPKPGTLVQCLRLPKFAEEENLCIDSITPCADGIHLLVGLRTCPVESLSAINQVEALNNLNKLNSALCNRRKGELESNLAVVNGANISVIQHESPADVQTPLIIQPEQRNVSGGYLVLYKMNYATRIVTLEEEPIKIQHIKDPQDTITSLILLPPDILDNREDDCEEPIEDMQLTSKNGFEREKTSDISTLGHLVITTQGGYVKILDLSNFEILAKVEPPKKEGTEEQDTFVSVIYCSGTDRLCACTKGGELHFLQIGGTCDDIDEADILVDGSLSKGIEPSSEGSKPLSNPSSPGISGVDLLVDQPFTLEILTSLVELTRFETLTPRFSATVPPCWVEVQQEQQQRRHPQHLHQQHHGDAAQHTRTWKLQTDSNSWDEHVFELVLPKACMVGHVDFKFVLNSNITNIPQIQVTLLKNKAPGLGKVNALNIEVEQNGKPSLVDLNEEMQHMDVEESQCLRLCPFLEDHKEDILCGPVWLASGLDLSGHAGMLTLTSPKLVKGMAGGKYRSFLIHVKAVNERGTEEICNGGMRPVVRLPSLKHQSNKGYSLASLLAKVAAGKEKSSNVKNENTSGTRKSENLRGCDLLQEVSVTIRRFKKTSISKERVQRCAMLQFSEFHEKLLNTLCRKTDDGQITEHAQSLVLDTLCWLAGVHSNGPGSSKEGNENLLSKTRKFLSDIVRVCFFEAGRSIAHKCARFLALCISNGKCDPCQPAFGPVLLKALLDNMSFLPAATTGGSVYWYFVLLNYVKDEDLAGCSTACASLLTAVSRQLQDRLTPMEALLQTRYGLYSSPFDPVLFDLEMSGSSCKNVYNSSIGVQSDEIDLSDVLSGNGKVSSCTAAEGSFTSLTGLLEVEPLHFTCVSTSDGTRIERDDAMSSFGVTPAVGGLSSGTVGEASTALSSAAQVALQSLSHAMASAEQQLQVLQEKQQQLLKLQQQKAKLEAKLHQTTAAAAAAASAVGPVHNSVPSNPVAAPGFFIHPSDVIPPTPKTTPLFMTPPLTPPNEAVSVVINAELAQLFPGSVIDPPAVNLAAHNKNSNKSRMNPLGSGLALAISHASHFLQPPPHQSIIIERMHSGARRFVTLDFGRPILLTDVLIPTCGDLASLSIDIWTLGEEVDGRRLVVATDISTHSLILHDLIPPPVCRFMKITVIGRYGSTNARAKIPLGFYYGHTYILPWESELKLMHDPLKGEGESANQPEIDQHLAMMVALQEDIQCRYNLACHRLETLLQSIDLPPLNSANNAQYFLRKPDKAVEEDSRVFSAYQDCIQLQLQLNLAHNAVQRLKVALGASRKMLSETSNPEDLIQTSSTEQLRTIIRYLLDTLLSLLHASNGHSVPAVLQSTFHAQACEELFKHLCISGTPKIRLHTGLLLVQLCGGERWWGQFLSNVLQELYNSEQLLIFPQDRVFMLLSCIGQRSLSNSGVLESLLNLLDNLLSPLQPQLPMHRRTEGVLDIPMISWVVMLVSRLLDYVATVEDEAAAAKKPLNGNQWSFINNNLHTQSLNRSSKGSSSLDRLYSRKIRKQLVHHKQQLNLLKAKQKALVEQMEKEKIQSNKGSSYKLLVEQAKLKQATSKHFKDLIRLRRTAEWSRSNLDTEVTTAKESPEIEPLPFTLAHERCISVVQKLVLFLLSMDFTCHADLLLFVCKVLARIANATRPTIHLCEIVNEPQLERLLLLLVGTDFNRGDISWGGAWAQYSLTCMLQDILAGELLAPVAAEAMEEGTVGDDVGATAGDSDDSLQQSSVQLLETIDEPLTHDITGAPPLSSLEKDKEIDLELLQDLMEVDIDPLDIDLEKDPLAAKVFKPISSTWYDYWGADYGTYNYNPYIGGLGIPVAKPPANTEKNGSQTVSVSVSQALDARLEVGLEQQAELMLKMMSTLEADSILQALTNTSPTLSQSPTGTDDSLLGGLQAANQTSQLIIQLSSVPMLNVCFNKLFSMLQVHHVQLESLLQLWLTLSLNSSSTGNKENGADIFLYNANRIPVISLNQASITSFLTVLAWYPNTLLRTWCLVLHSLTLMTNMQLNSGSSSAIGTQESTAHLLVSDPNLIHVLVKFLSGTSPHGTNQHSPQVGPTATQAMQEFLTRLQVHLSSTCPQIFSEFLLKLIHILSTERGAFQTGQGPLDAQVKLLEFTLEQNFEVVSVSTISAVIESVTFLVHHYITCSDKVMSRSGSDSSVGARACFGGLFANLIRPGDAKAVCGEMTRDQLMFDLLKLVNILVQLPLSGNREYSARVSVTTNTTDSVSDEEKVSGGKDGNGSSTSVQGSPAYVADLVLANQQIMSQILSALGLCNSSAMAMIIGASGLHLTKHENFHGGLDAISVGDGLFTILTTLSKKASTVHMMLQPILTYMACGYMGRQGSLATCQLSEPLLWFILRVLDTSDALKAFHDMGGVQLICNNMVTSTRAIVNTARSMVSTIMKFLDSGPNKAVDSTLKTRILASEPDNAEGIHNFAPLGTITSSSPTAQPAEVLLQATPPHRRARSAAWSYIFLPEEAWCDLTIHLPAAVLLKEIHIQPHLASLATCPSSVSVEVSADGVNMLPLSTPVVTSGLTYIKIQLVKAEVASAVCLRLHRPRDASTLGLSQIKLLGLTAFGTTSSATVNNPFLPSEDQVSKTSIGWLRLLHHCLTHISDLEGMMASAAAPTANLLQTCAALLMSPYCGMHSPNIEVVLVKIGLQSTRIGLKLIDILLRNCAASGSDPTDLNSPLLFGRLNGLSSDSTIDILYQLGTTQDPGTKDRIQALLKWVSDSARVAAMKRSGRMNYMCPNSSTVEYGLLMPSPSHLHCVAAILWHSYELLVEYDLPALLDQELFELLFNWSMSLPCNMVLKKAVDSLLCSMCHVHPNYFSLLMGWMGITPPPVQCHHRLSMTDDSKKQDLSSSLTDDSKNAQAPLALTESHLATLASSSQSPEAIKQLLDSGLPSLLVRSLASFCFSHISSSESIAQSIDISQDKLRRHHVPQQCNKMPITADLVAPILRFLTEVGNSHIMKDWLGGSEVNPLWTALLFLLCHSGSTSGSHNLGAQQTSARSASLSSAATTGLTTQQRTAIENATVAFFLQCISCHPNNQKLMAQVLCELFQTSPQRGNLPTSGNISGFIRRLFLQLMLEDEKVTMFLQSPCPLYKGRINATSHVIQHPMYGAGHKFRTLHLPVSTTLSDVLDRVSDTPSITAKLISEQKDDKEKKNHEEKEKVKAENGFQDNYSVVVASGLKSQSKRAVSATPPRPPSRRGRTIPDKIGSTSGAEAANKIITVPVFHLFHKLLAGQPLPAEMTLAQLLTLLYDRKLPQGYRSIDLTVKLGSRVITDPSLSKTDSYKRLHPEKDHGDLLASCPEDEALTPGDECMDGILDESLLETCPIQSPLQVFAGMGGLALIAERLPMLYPEVIQQVSAPVVTSTTQEKPKDSDQFEWVTIEQSGELVYEAPETVAAEPPPIKSAVQTMSPIPAHSLAAFGLFLRLPGYAEVLLKERKHAQCLLRLVLGVTDDGEGSHILQSPSANVLPTLPFHVLRSLFSTTPLTTDDGVLLRRMALEIGALHLILVCLSALSHHSPRVPNSSVNQTEPQVSSSHNPTSTEEQQLYWAKGTGFGTGSTASGWDVEQALTKQRLEEEHVTCLLQVLASYINPVSSAVNGEAQSSHETRGQNSNALPSVLLELLSQSCLIPAMSSYLRNDSVLDMARHVPLYRALLELLRAIASCAAMVPLLLPLSTENGEEEEEQSECQTSVGTLLAKMKTCVDTYTNRLRSKRENVKTGVKPDASDQEPEGLTLLVPDIQKTAEIVYAATTSLRQANQEKKLGEYSKKAAMKPKPLSVLKSLEEKYVAVMKKLQFDTFEMVSEDEDGKLGFKVNYHYMSQVKNANDANSAARARRLAQEAVTLSTSLPLSSSSSVFVRCDEERLDIMKVLITGPADTPYANGCFEFDVYFPQDYPSSPPLVNLETTGGHSVRFNPNLYNDGKVCLSILNTWHGRPEEKWNPQTSSFLQVLVSVQSLILVAEPYFNEPGYERSRGTPSGTQSSREYDGNIRQATVKWAMLEQIRNPSPCFKEVIHKHFYLKRVEIMAQCEEWIADIQQYSSDKRVGRTMSHHAAALKRHTAQLREELLKLPCPEGLDPDTDDAPEVCRATTGAEETLMHDQVKPSSSKELPSDFQL

SEQ ID NO: 81 - protein, 766 aa, Homo sapiens [sequence omitted]

SEQ ID NO: 82 - protein, 3418 aa, Homo sapiens
MPIGSKERPTFFEIFKTRCNKADLGPISLNWFEELSSEAPPYNSEPAEESEHKNNNYEPNLFKTPQRKPSYNQLASTPIIFKEQGLTLPLYQSPVKELDKFKLDLGRNVPNSRHKSLRTVKTKMDQADDVSCPLLNSCLSESPVVLQCTHVTPQRDKSVVCGSLFHTPKFVKGRQTPKHISESLGAEVDPDMSWSSSLATPPTLSSTVLIVRNEEASETVFPHDTTANVKSYFSNHDESLKKNDRFIASVTDSENTNQREAASHGFGKTSGNSFKVNSCKDHIGKSMPNVLEDEVYETVVDTSEEDSFSLCFSKCRTKNLQKVRTSKTRKKIFHEANADECEKSKNQVKEKYSFVSEVEPNDTDPLDSNVANQKPFESGSDKISKEVVPSLACEWSQLTLSGLNGAQMEKIPLLHISSCDQNISEKDLLDTENKRKKDFLTSENSLPRISSLPKSEKPLNEETVVNKRDEEQHLESHTDCILAVKQAISGTSPVASSFQGIKKSIFRIRESPKETFNASFSGHMTDPNFKKETEASESGLEIHTVCSQKEDSLCPNLIDNGSWPATTTQNSVALKNAGLISTLKKKTNKFIYAIHDETSYKGKKIPKDQKSELINCSAQFEANAFEAPLTFANADSGLLHSSVKRSCSQNDSEEPTLSLTSSFGTILRKCSRNETCSNNTVISQDLDYKEAKCNKEKLQLFITPEADSLSCLQEGQCENDPKSKKVSDIKEEVLAAACHPVQHSKVEYSDTDFQSQKSLLYDHENASTLILTPTSKDVLSNLVMISRGKESYKMSDKLKGNNYESDVELTKNIPMEKNQDVCALNENYKNVELLPPEKYMRVASPSRKVQFNQNTNLRVIQKNQEETTSISKITVNPDSEELFSDNENNFVFQVANERNNLALGNTKELHETDLTCVNEPIFKNSTMVLYGDTGDKQATQVSIKKDLVYVLAEENKNSVKQHIKMTLGQDLKSDISLNIDKIPEKNNDYMNKWAGLLGPISNHSFGGSFRTASNKEIKLSEHNIKKSKMFFKDIEEQYPTSLACVEIVNTLALDNQKKLSKPQSINTVSAHLQSSVVVSDCKNSHITPQMLFSKQDFNSNHNLTPSQKAEITELSTILEESGSQFEFTQFRKPSYILQKSTFEVPENQMTILKTTSEECRDADLHVIMNAPSIGQVDSSKQFEGTVEIKRKFAGLLKNDCNKSASGYLTDENEVGFRGFYSAHGTKLNVSTEALQKAVKLFSDIENISEETSAEVHPISLSSSKCHDSVVSMFKIENHNDKTVSEKNNKCQLILQNNIEMTTGTFVEEITENYKRNTENEDNKYTAASRNSHNLEFDGSDSSKNDTVCIHKDETDLLFTDQHNICLKLSGQFMKEGNTQIKEDLSDLTFLEVAKAQEACHGNTSNKEQLTATKTEQNIKDFETSDTFFQTASGKNISVAKESFNKIVNFFDQKPEELHNFSLNSELHSDIRKNKMDILSYEETDIVKHKILKESVPVGTGNQLVTFQGQPERDEKIKEPTLLGFHTASGKKVKIAKESLDKVKNLFDEKEQGTSEITSFSHQWAKTLKYREACKDLELACETIEITAAPKCKEMQNSLNNDKNLVSIETVVPPKLLSDNLCRQTENLKTSKSIFLKVKVHENVEKETAKSPATCYTNQSPYSVIENSALAFYTSCSRKTSVSQTSLLEAKKWLREGIFDGQPERINTADYVGNYLYENNSNSTIAENDKNHLSEKQDTYLSNSSMSNSYSYHSDEVYNDSGYLSKNKLDSGIEPVLKNVEDQKNTSFSKVISNVKDANAYPQTVNEDICVEELVTSSSPCKNKNAAIKLSISNSNNFEVGPPAFRIASGKIVCVSHETIKKVKDIFTDSFSKVIKENNENKSKICQTKIMAGCYEALDDSEDILHNSLDNDECSTHSHKVFADIQSEEILQHNQNMSGLEKVSKISPCDVSLETSDICKCSIGKLHKSVSSANTCGIFSTASGKSVQVSDASLQNARQVFSEIEDSTKQVFSKVLFKSNEHSDQLTREENTAIRTPEHLISQKGFSYNVVNSSAFSGFSTASGKQVSILESSLHKVKGVLEEFDLIRTEHSLHYSPTSRQNVSKILPRVDKRNPEHCVNSEMEKTCSKEFKLSNNLNVEGGSSENNHSIKVSPYLSQFQQDKQQLVLGTKVSLVENIHVLGKEQASPKNVKMEIGKTETFSDVPVKTNIEVCSTYSKDSENYFETEAVEIAKAFMEDDELTDSKLPSHATHSLFTCPENEEMVLSNSRIGKRRGEPLILVGEPSIKRNLLNEFDRIIENQEKSLKASKSTPDGTIKDRRLFMHHVSLEPITCVPFRTTKERQEIQNPNFTAPGQEFLSKSHLYEHLTLEKSSSNLAVSGHPFYQVSATRNEKMRHLITTGRPTKVFVPPFKTKSHFHRVEQCVRNINLEENRQKQNIDGHGSDDSKNKINDNEIHQFNKNNSNQAAAVTFTKCEEEPLDLITSLQNARDIQDMRIKKKQRQRVFPQPGSLYLAKTSTLPRISLKAAVGGQVPSACSHKQLYTYGVSKHCIKINSKNAESFQFHTEDYFGKESLWTGKGIQLADGGWLIPSNDGKAGKEEFYRALCDTPGVDPKLISRIWVYNHYRWIIWKLAAMECAFPKEFANRCLSPERVLLQLKYRYDTEIDRSRRSAIKKIMERDDTAAKTLVLCVSDIISLSANISETSSNKTSSADTQKVAIIELTDGWYAVKAQLDPPLLAVLKNGRLTVGQKIILHGAELVGSPDACTPLEAPESLMLKISANSTRPARWYTKLGFFPDPRPFPLPLSSLFSDGGNVGCVDVIIQRAYPIQWMEKTSSGLYIFRNEREEEKEAAKYVEAQQKRLEALFTKIQEEFEEHEENTTKPYLPSRALTRQQVRALQDGAELYEAVKNAADPAYLEGYFSEEQLRALNNHRQMLNDKKQAQIQLEIRKAMESAEQKEQGLSRDVTTVWKLRIVSYSKKEKDSVILSIWRPSSDLYSLLTEGKRYRIYHLATSKSKSKSERANIQLAATKKTQYQQLPVSDEILFQIYQPREPLHFSKFLDPDFQPSCSEVDLIGFVVSVVKKTGLAPFVYLSDECYNLLAIKFWIDLNEDIIKPHMLIAASNLQWRPESKSGLLTLFAGDFSVFSASPKEGHFQETFNKMKNTVENIDILCNEAENKLMHILHANDPKWSTPTKDCTSGPYTAQIIPGTGNKLLMSSPNCEIYYQSPLSLCMAKRKSVSTPVSAQMTSKSCKGEKEIDDQKNCKKRRALDFLSRLPLPPPVSPICTFVSPAAQKAFQPPRSCGTKYETPIKKKELNSPQMTPFKKFNEISLLESNSIADEELALINTQALLSGSTGEKQFISVSESTRTAPTSSEDYLRLKRRCTTSLIKEQESSQASTEECEKNKQDTITTKKYI

SEQ ID NO: 83 - protein, 761 aa, Homo sapiens
MNWRFVELLYFLFIWGRISVQPSHQEPAGTDQHVSKEFDWLISDRGPFHHSRSYLSFVERHRQGFTTRYKIYREFARWKVRNTAIERRDLVRHPVPLMPEFQRSIRLLGRRPTTQQFIDTIIKKYGTHLLISATLGGEEALTMYMDKSRLDRKSGNATQSVEALHQLASSYFVDRDGTMRRLHEIQISTGAIKVTETRTGPLGCNSYDNLDSVSSVLLQSTESKLHLQGLQIIFPQYLQEKFVQSALSYIMCNGEGEYLCQNSQCRCQCAEEFPQCNCPITDIQIMEYTLANMAKSWAEAYKDLENSDEFKSFMKRLPSNHFLTIGSIHQHWGNDWDLQNRYKLLQSATEAQRQKIQRTARKLFGLSVRCRHNPNHQLPRERTIQQWLARVQSLLYCNENGFWGTFLESQRSCVCHGSTTLCQRPIPCVIGGNNSCAMCSLANISLCGSCNKGYKLYRGRCEPQNVDSERSEQFISFETDLDFQDLELKYLLQKMDSRLYVHTTFISNEIRLDTFFDPRWRKRMSLTLKSNKNRMDFIHMVIGMSMRICQMRNSSLDPMFFVYVNPFSGSHSEGWNMPFGEFGYPRWEKIRLQNSQCYNWTLLLGNRWKTFFETVHIYLRSRTRLPTLLRNETGQGPVDLSDPSKRQFYIKISDVQVFGYSLRFNADLLRSAVQQVNQSYTQGGQFYSSSSVMLLLLDIRDRINRLAPPVAPGKPQLDLFSCMLKHRLKLTNSEIIRVNHALDLYNTEILKQSDQMTAKLC

SEQ ID NO: 84 - protein, 1849 aa, Homo sapiens
MAVSRLDRLFILLDTGTTPVTRKAAAQQLGEVVKLHPHELNNLLSKVLIYLRSANWDTRIAAGQAVEAIVKNVPEWNPVPRTRQEPTSESSMEDSPTTERLNFDRFDICRLLQHGASLLGSAGAEFEVQDEKSGEVDPKERIARQRKLLQKKLGLNMGEAIGMSTEELFNDEDLDYTPTSASFVNKQPTLQAAELIDSEFRAGMSNRQKNKAKRMAKLFAKQRSRDAVETNEKSNDSTDGEPEEKRRKIANVVINQSANDSKVLIDNIPDSSSLIEETNEWPLESFCEELCNDLFNPSWEVRHGAGTGLREILKAHGKSGGKMGDSTLEEMIQQHQEWLEDLVIRLLCVFALDRFGDFVSDEVVAPVRETCAQTLGVVLKHMNETGVHKTVDVLLKLLTQEQWEVRHGGLLGIKYALAVRQDVINTLLPKVLTRIIEGLQDLDDDVRAVAAASLVPVVESLVYLQTQKVPFIINTLWDALLELDDLTASTNSIMTLLSSLLTYPQVQQCSIQQSLTVLVPRVWPFLHHTISSVRRAALETLFTLLSTQDQNSSSWLIPILPDMLRHIFQFCVLESSQEILDLIHKVWMELLSKASVQYVVAAACPWMGAWLCLMMQPSHLPIDLNMLLEVKARAKEKTGGKVRQGQSQNKEVLQEYIAGADTIMEDPATRDFVVMRARMMAAKLLGALCCCICDPGVNVVTQEIKPAESLGQLLLFHLNSKSALQRISVALVICEWAALQKECKAVTLAVQPRLLDILSEHLYYDEIAVPFTRMQNECKQLISSLADVHIEVGNRVNNNVLTIDQASDLVTTVFNEATSSFDLNPQVLQQLDSKRQQVQMTVTETNQEWQVLQLRVHTFAACAVVSLQQLPEKLNPIIKPLMETIKKEENTLVQNYAAQCIAKLLQQCTTRTPCPNSKIIKNLCSSLCVDPYLTPCVTCPVPTQSGQENSKGSTSEKDGMHHTVTKHRGIITLYRHQKAAFAITSRRGPTPKAVKAQIADLPAGSSGNILVELDEAQKPYLVQRRGAEFALTTIVKHFGGEMAVKLPHLWDAMVGPLRNTIDINNFDGKSLLDKGDSPAQELVNSLQVFETAAASMDSELHPLLVQHLPHLYMCLQYPSTAVRHMAARCVGVMSKIATMETMNIFLEKVLPWLGAIDDSVKQEGAIEALACVMEQLDVGIVPYIVLLVVPVLGRMSDQTDSVRFMATQCFATLIRLMPLEAGIPDPPNMSAELIQLKAKERHFLEQLLDGKKLENYKIPVPINAELRKYQQDGVNWLAFLNKYKLHGILCDDMGLGKTLQSICILAGDHCHRAQEYARSKLAECMPLPSLVVCPPTLTGHWVDEVGKFCSREYLNPLHYTGPPTERIRLQHQVKRHNLIVASYDVVRNDIDFFRNIKFNYCILDEGHVIKNGKTKLSKAVKQLTANYRIILSGTPIQNNVLELWSLFDFLMPGFLGTERQFAARYGKPILASRDARSSSREQEAGVLAMDALHRQVLPFLLRRMKEDVLQDLPPKIIQDYYCTLSPLQVQLYEDFAKSRAKCDVDETVSSATLSEETEKPKLKATGHVFQALQYLRKLCNHPALVLTPQHPEFKTTAEKLAVQNSSLHDIQHAPKLSALKQLLLDCGLGNGSTSESGTESVVAQHRILIFCQLKSMLDIVEHDLLKPHLPSVTYLRLDGSIPPGQRHSIVSRFNNDPSIDVLLLTTHVGGLGLNLTGADTVVFVEHDWNPMRDLQAMDRAHRIGQKRVVNVYRLITRGTLEEKIMGLQKFKMNIANTVISQENSSLQSMGTDQLLDLFTLDKDGKAEKADTSTSGKASMKSILENLSDLWDQEQYDSEYSLENFMHSLK

SEQ ID NO: 85 - protein, 1857 aa, Homo sapiens
MEQLTTLPRPGDPGAMEPWALPTWHSWTPGRGGEPSSAAPSIADTPPAALQLQELRSEESSKPKGDGSSRPVGGTDPEGAEACLPSLGQQASSSGPACQRPEDEEVEAFLKAKLNMSFGDRPNLELLRALGELRQRCAILKEENQMLRKSSFPETEEKVRRLKRKNAELAVIAKRLEERARKLQETNLRVVSAPLPRPGTSLELCRKALARQRARDLSETASALLAKDKQIAALQRECRELQARLTLVGKEGPQWLHVRDFDRLLRESQREVLRLQRQIALRNQRETLPLPPSWPPGPALQARAGAPAPGAPGEATPQEDADNLPVILGEPEKEQRVQQLESELSKKRKKCESLEQEARKKQRRCEELELQLRQAQNENARLVEENSRLSGRATEKEQVEWENAELRGQLLGVTQERDSALRKSQGLQSKLESLEQVLKHMREVAQRRQQLEVEHEQARLSLREKQEEVRRLQQAQAEAQREHEGAVQLLESTLDSMQARVRELEEQCRSQTEQFSLLAQELQAFRLHPGPLDLLTSALDCGSLGDCPPPPCCCSIPQPCRGSGPKDLDLPPGSPGRCTPKSSEPAPATLTGVPRRTAKKAESLSNSSHSESIHNSPKSCPTPEVDTASEVEELEADSVSLLPAAPEGSRGGARIQVFLARYSYNPFEGPNENPEAELPLTAGEYIYIYGNMDEDGFFEGELMDGRRGLVPSNFVERVSDDDLLTSLPPELADLSHSSGPELSFLSVGGGGSSSGGQSSVGRSQPRPEEEDAGDELSLSPSPEGLGEPPAVPYPRRLVVLKQLAHSVVLAWEPPPEQVELHGFHICVNGELRQALGPGAPPKAVLENLDLWAGPLHISVQALTSRGSSDPLRCCLAVGARAGVVPSQLRVHRLTATSAEITWVPGNSNLAHAIYLNGEECPPASPSTYWATFCHLRPGTPYQAQVEAQLPPQGPWEPGWERLEQRAATLQFTTLPAGPPDAPLDVQIEPGPSPGILIISWLPVTIDAAGTSNGVRVTGYAIYADGQKIMEVASPTAGSVLVELSQLQLLQVCREVVVRTMSPHGESADSIPAPITPALAPASLPARVSCPSPHPSPEARAPLASASPGPGDPSSPLQHPAPLGTQEPPGAPPASPSREMAKGSHEDPPAPCSQEEAGAAVLGTSEERTASTSTLGEKDPGPAAPSLAKQEAEWTAGEACPASSSTQGARAQQAPNTEMCQGGDPGSGLRPRAEKEDTAELGVHLVNSLVDHGRNSDLSDIQEEEEEEEEEEEEELGSRTCSFQKQVAGNSIRENGAKSQPDPFCETDSDEEILEQILELPLQQFCSKKLFSIPEEEEEEEEDEEEEKSGAGCSSRDPGPPEPALLGLGCDSGQPRRPGQCPLSPESSRAGDCLEDMPGLVGGSSRRRGGGSPEKPPSRRRPPDPREHCSRLLSNNGPQASGRLGPTRERGGLPVIEGPRTGLEASGRGRLGPSRRCSRGRALEPGLASCLSPKCLEISIEYDSEDEQEAGSGGISITSSCYPGDGEAWGTATVGRPRGPPKANSGPKPYPRLPAWEKGEPERRGRSATGRAKEPLSRATETGEARGQDGSGRRGPQKRGVRVLRPSTAELVPARSPSETLAYQHLPVRIFVALFDYDPVSMSPNPDAGEEELPFREGQILKVFGDKDADGFYQGEGGGRTGYIPCNMVAEVAVDSPAGRQQLLQRGYLSPDILLEGSGNGPFVYSTAHTTGPPPKPRRSKKAESEGPAQPCPGPPKLVPSADLKAPHSMVAAFDYNPQESSPNMDVEAELPFRAGDVITVFGGMDDDGFYYGELNGQRGLVPSNFLEGPGPEAGGLDREPRTPQAESQRTRRRRVQC

SEQ ID NO: 86 - protein, 1322 aa, Homo sapiens
MPVVWPTLLDLSRDECKRILRKLELEAYAGVISALRAQGDLTKEKKDLLGELSKVLSISTERHRAEVRRAVNDERLTTIAHNMSGPNSSSEWSIEGRRLVPLMPRLVPQTAFTVTANAVANAAIQHNASLPVPAETGSKEVVCYSYTSTTSTPTSTPVPSGSIATVKSPRPASPASNVVVLPSGSTVYVKSVSCSDEDEKPRKRRRTNSSSSSPVVLKEVPKAVVPVSKTITVPVSGSPKMSNIMQSIANSLPPHMSPVKITFTKPSTQTTNTTTQKVIIVTTSPSSTFVPNILSKSHNYAAVTKLVPTSVIASTTQKPPVVITASQSSLVSNSSSGSSSSTPSPIPNTVAVTAVVSSTPSVVMSTVAQGVSTSAIKMASTRLPSPKSLVSAPTQILAQFPKQHQQSPKQQLYQVQQQTQQQVAQPSPVSHQQQPQQSPLPPGIKPTIQIKQESGVKIITQQVQPSKILPKPVTATLPTSSNSPIMVVSSNGAIMTTKLVTTPTGTQATYTRPTVSPSIGRMAATPGAATYVKTTSGSIITVVPKSLATLGGKIISSNIVSGTTTKITTIPMTSKPNVIVVQKTTGKGTTIQGLPGKNVVTTLLNAGGEKTIQTVPTGAKPAILTATRPITKMIVTQPKGIGSTVQPAAKIIPTKIVYGQQGKTQVLIKPKPVTFQATVVSEQTRQLVTETLQQASRVAEAGNSSIQEGKEEPQNYTDSSSSSTESSQSSQDSQPVVHVIASRRQDWSEHEIAMETSPTIIYQDVSSESQSATSTIKALLELQQTTVKEKLESKPRQPTIDLSQMAVPIQMTQEKRHSPESPSIAVVESELVAEYITTERTDEGTEVAFPLLVSHRSQPQQPSQPQRTLLQHVAQSQTATQTSVVVKSIPASSPGAITHIMQQALSSHTAFTKHSEELGTEEGEVEEMDTLDPQTGLFYRSALTQSQSAKQQKLSQPPLEQTQLQVKTLQCFQTKQKQTIHLQADQLQHKLPQMPQLSIRHQKLTPLQQEQAQPKPDVQHTQHPMVAKDRQLPTLMAQPPQTVVQVLAVKTTQQLPKLQQAPNQPKIYVQPQTPQSQMSLPASSEKQTASQVEQPIITQGSSVTKITFEGRQPPTVTKITGGSSVPKLTSPVTSISPIQASEKTAVSDILKMSLMEAQIDTNVEHMIVDPPKKALATSMLTGEAGSLPSTHMVVAGMANSTPQQQKCRESCSSPSTVGSSLTTRKIDPPAVPATGQFMRIQNVGQKKAEESPAEIIIQAIPQYAIPCHSSSNVVVEPSGLLELNNFTSQQLDDEETAMEQDIDSSTEDGTEPSPSQSSAERS

SEQ ID NO: 87 - protein, 126 aa, Homo sapiens
MASASTQPAALSAEQAKVVLAEVIQAFSAPENAVRMDEARDNACNDMGKMLQFVLPVATQIQQEVIKAYGFSCDGEGVLKFARLVKSYEAQDPEIASLSGKLKALFLPPMTLPPHGPAAGGSVAAS

SEQ ID NO: 88 - protein, 220 aa, Homo sapiens
MFQGQRGWFCGSVSQDLRQFWVAEGGTISDPRAADFLFSCDASHPDTLRIYQSLDYIEDNATVFHAYYLSAVANAKIKNSVALGHFILPPACLQKEIRRKIGSFIWEQDQHFLIEKHDEVTPNEIKTLRENSELATEHKKELSKSPEKHFIRTPVVEKQMYFPLQNYPVNNMVTGYISIDAMKKFLGELHDFIPGTSGYLAYHVQNEINMSAIKNKLKRK

SEQ ID NO: 89 - protein, 430 aa, Homo sapiens
MWRLVPPKLGRLSRSLKLAALGSLLVLMVLHSPSLLASWQRNELTDRRFLQLNKCPACFGTSWCRRFLNGQVVFEAWGRLRLLDFLNVKNVYFAQYGEPREGGRRRVVLKRLGSQRELAQLDQSICKRATGRPRCDLLQAMPRTEFARLNGDVRLLTPEAVEGWSDLVHCPSQRLLDRLVRRYAETKDSGSFLLRNLKDSERMQLLLTLAFNPEPLVLQSFPSDEGWPFAKYLGACGRMVAVNYVGEELWSYFNAPWEKRVDLAWQLMEIAEQLTNNDFEFALYLLDVSFDNFAVGPRDGKVIIVDAENVLVADKRLIRQNKPENWDVWYESKFDDCDKEACLSFSKEILCARATVDHNYYAVCQNLLSRHATWRGTSGGLLHDPPSEIAKDGRLEALLDECANPKKRYGRFQAAKELREYLAQLSNNVR

SEQ ID NO: 90 - protein, 1744 aa, Homo sapiens
MRLLWGLIWASSFFTLSLQKPRLLLFSPSVVHLGVPLSVGVQLQDVPRGQVVKGSVFLRNPSRNNVPCSPKVDFTLSSERDFALLSLQVPLKDAKSCGLHQLLRGPEVQLVAHSPWLKDSLSRTTNIQGINLLFSSRRGHLFLQTDQPIYNPGQRVRYRVFALDQKMRPSTDTITVMVENSHGLRVRKKEVYMPSSIFQDDFVIPDISEPGTWKISARFSDGLESNSSTQFEVKKYVLPNFEVKITPGKPYILTVPGHLDEMQLDIQARYIYGKPVQGVAYVRFGLLDEDGKKTFFRGLESQTKLVNGQSHISLSKAEFQDALEKLNMGITDLQGLRLYVAAAIIEYPGGEMEEAELTSWYFVSSPFSLDLSKTKRHLVPGAPFLLQALVREMSGSPASGIPVKVSATVSSPGSVPEVQDIQQNTDGSGQVSIPIIIPQTISELQLSVSAGSPHPAIARLTVAAPPSGGPGFLSIERPDSRPPRVGDTLNLNLRAVGSGATFSHYYYMILSRGQIVFMNREPKRTLTSVSVFVDHHLAPSFYFVAFYYHGDHPVANSLRVDVQAGACEGKLELSVDGAKQYRNGESVKLHLETDSLALVALGALDTALYAAGSKSHKPLNMGKVFEAMNSYDLGCGPGGGDSALQVFQAAGLAFSDGDQWTLSRKRLSCPKEKTTRKKRNVNFQKAINEKLGQYASPTAKRCCQDGVTRLPMMRSCEQRAARVQQPDCREPFLSCCQFAESLRKKSRDKGQAGLQRALEILQEEDLIDEDDIPVRSFFPENWLWRVETVDRFQILTLWLPDSLTTWEIHGLSLSKTKGLCVATPVQLRVFREFHLHLRLPMSVRRFEQLELRPVLYNYLDKNLTVSVHVSPVEGLCLAGGGGLAQQVLVPAGSARPVAFSVVPTAAAAVSLKVVARGSFEFPVGDAVSKVLQIEKEGAIHREELVYELNPLDHRGRTLEIPGNSDPNMIPDGDFNSYVRVTASDPLDTLGSEGALSPGGVASLLRLPRGCGEQTMIYLAPTLAASRYLDKTEQWSTLPPETKDHAVDLIQKGYMRIQQFRKADGSYAAWLSRGSSTWLTAFVLKVLSLAQEQVGGSPEKLQETSNWLLSQQQADGSFQDLSPVIHRSMQGGLVGNDETVALTAFVTIALHHGLAVFQDEGAEPLKQRVEASISKASSFLGEKASAGLLGAHAAAITAYALTLTKAPADLRGVAHNNLMAMAQETGDNLYWGSVTGSQSNAVSPTPAPRNPSDPMPQAPALWIETTAYALLHLLLHEGKAEMADQAAAWLTRQGSFQGGFRSTQDTVIALDALSAYWIASHTTEERGLNVTLSSTGRNGFKSHALQLNNRQIRGLEEELQFSLGSKINVKVGGNSKGTLKVLRTYNVLDMKNTTCQDLQIEVTVKGHVEYTMEANEDYEDYEYDELPAKDDPDAPLQPVTPLQLFEGRRNRRRREAPKVVEEQESRVHYTVCIWRNGKVGLSGMAIADVTLLSGFHALRADLEKLTSLSDRYVSHFETEGPHVLLYFDSVPTSRECVGFEAVQEVPVGLVQPASATLYDYYNPERRCSVFYGAPSKSRLLATLCSAEVCQCAEGKCPRQRRALERGLQDEDGYRMKFACYYPRVEYGFQVKVLREDSRAAFRLFETKITQVLHFTKDVKAAANQMRNFLVRASCRLRLEPGKEYLIMGLDGATYDLEGHPQYLLDSNSWIEEMPSERLCRSTRQRAACAQLNDFLQEYGTQGCQV

SEQ ID NO: 91-94 - skipped (4 entries)

SEQ ID NO: 95 - protein, 313 aa, Homo sapiens
MRALVLLLSLFLLGGQAQHVSDWTYSEGALDEAHWPQHYPACGGQRQSPINLQRTKVRYNPSLKGLNMTGYETQAGEFPMVNNGHTVQISLPSTMRMTVADGTVYIAQQMHFHWGGASSEISGSEHTVDGIRHVIEIHIVHYNSKYKSYDIAQDAPDGLAVLAAFVEVKNYPENTYYSNFISHLANIKYPGQRTTLTGLDVQDMLPRNLQHYYTYHGSLTTPPCTENVHWFVLADFVKLSRTQVWKLENSLLDHRNKTIHNDYRRTQPLNHRVVESNFPNQGKGHGGHRGRSQNPRVQPTSTRHPLALGSLEA

SEQ ID NO: 96 - protein, 2512 aa, Homo sapiens
MARFGDEMPARYGGGGSGAAAGVVVGSGGGRGAGGSRQGGQPGAQRMYKQSMAQRARTMALYNPIPVRQNCLTVNRSLFLFSEDNVVRKYAKKITEWPPFEYMILATIIANCIVLALEQHLPDDDKTPMSERLDDTEPYFIGIFCFEAGIKIIALGFAFHKGSYLRNGWNVMDFVVVLTGILATVGTEFDLRTLRAVRVLRPLKLVSGIPSLQVVLKSIMKAMIPLLQIGLLLFFAILIFAIIGLEFYMGKFHTTCFEEGTDDIQGESPAPCGTEEPARTCPNGTKCQPYWEGPNNGITQFDNILFAVLTVFQCITMEGWTDLLYNSNDASGNTWNWLYFIPLIIIGSFFMLNLVLGVLSGEFAKERERVENRRAFLKLRRQQQIERELNGYMEWISKAEEVILAEDETDGEQRHPFDGALRRTTIKKSKTDLLNPEEAEDQLADIASVGSPFARASIKSAKLENSTFFHKKERRMRFYIRRMVKTQAFYWTVLSLVALNTLCVAIVHYNQPEWLSDFLYYAEFIFLGLFMSEMFIKMYGLGTRPYFHSSFNCFDCGVIIGSIFEVIWAVIKPGTSFGISVLRALRLLRIFKVTKYWASLRNLVVSLLNSMKSIISLLFLLFLFIVVFALLGMQLFGGQFNFDEGTPPTNFDTFPAAIMTVFQILTGEDWNEVMYDGIKSQGGVQGGMVFSIYFIVLTLFGNYTLLNVFLAIAVDNLANAQELTKVEADEQEEEEAANQKLALQKAKEVAEVSPLSAANMSIAVKEQQKNQKPAKSVWEQRTSEMRKQNLLASREALYNEMDPDERWKAAYTRHLRPDMKTHLDRPLVVDPQENRNNNTNKSRAAEPTVDQRLGQQRAEDFLRKQARYHDRARDPSGSAGLDARRPWAGSQEAELSREGPYGRESDHHAREGSLEQPGFWEGEAERGKAGDPHRRHVHRQGGSRESRSGSPRTGADGEHRRHRAHRRPGEEGPEDKAERRARHREGSRPARGGEGEGEGPDGGERRRRHRHGAPATYEGDARREDKERRHRRRKENQGSGVPVSGPNLSTTRPIQQDLGRQDPPLAEDIDNMKNNKLATAESAAPHGSLGHAGLPQSPAKMGNSTDPGPMLAIPAMATNPQNAASRRTPNNPGNPSNPGPPKTPENSLIVTNPSGTQTNSAKTARKPDHTTVDIPPACPPPLNHTVVQVNKNANPDPLPKKEEEKKEEEEDDRGEDGPKPMPPYSSMFILSTTNPLRRLCHYILNLRYFEMCILMVIAMSSIALAAEDPVQPNAPRNNVLRYFDYVFTGVFTFEMVIKMIDLGLVLHQGAYFRDLWNILDFIVVSGALVAFAFTGNSKGKDINTIKSLRVLRVLRPLKTIKRLPKLKAVFDCVVNSLKNVFNILIVYMLFMFIFAVVAVQLFKGKFFHCTDESKEFEKDCRGKYLLYEKNEVKARDREWKKYEFHYDNVLWALLTLFTVSTGEGWPQVLKHSVDATFENQGPSPGYRMEMSIFYVVYFVVFPFFFVNIFVALIIITFQEQGDKMMEEYSLEKNERACIDFAISAKPLTRHMPQNKQSFQYRMWQFVVSPPFEYTIMAMIALNTIVLMMKFYGASVAYENALRVFNIVFTSLFSLECVLKVMAFGILNYFRDAWNIFDFVTVLGSITDILVTEFGNPNNFINLSFLRLFRAARLIKLLRQGYTIRILLWTFVQSFKALPYVCLLIAMLFFIYAIIGMQVFGNIGIDVEDEDSDEDEFQITEHNNFRTFFQALMLLFRSATGEAWHNIMLSCLSGKPCDKNSGILTRECGNEFAYFYFVSFIFLCSFLMLNLFVAVIMDNFEYLTRDSSILGPHHLDEYVRVWAEYDPAAWGRMPYLDMYQMLRHMSPPLGLGKKCPARVAYKRLLRMDLPVADDNTVHFNSTLMALIRTALDIKIAKGGADKQQMDAELRKEMMAIWPNLSQKTLDLLVTPHKSTDLTVGKIYAAMMIMEYYRQSKAKKLQAMREEQDRTPLMFQRMEPPSPTQEGGPGQNALPSTQLDPGGALMAHESGLKESPSWVTQRAQEMFQKTGTWSPEQGPPTDMPNSQPNSQSVEMREMGRDGYSDSEHYLPMEGQGRAASMPRLPAENQRRRGRPRGNNLSTISDTSPMKRSASVLGPKARRLDDYSLERVPPEENQRHHQRRRDRSHRASERSLGRYTDVDTGLGTDLSMTTQSGDLPSKERDQERGRPKDRKHRQHHHHHHHHHHPPPPDKDRYAQERPDHGRARARDQRWSRSPSEGREHMAHRQGSSSVSGSPAPSTSGTSTPRRGRRQLPQTPSTPRPHVSYSPVIRKAGGSGPPQQQQQQQQQQQQQAVARPGRAATSGPRRYPGPTAEPLAGDRPPTGGHSSGRSPRMERRVPGPARSESPRACRHGGARWPASGPHVSEGPPGPRHHGYYRGSDYDEADGPGSGGGEEAMAGAYDAPPPVRHASSGATGRSPRTPRASGPACASPSRHGRRLPNGYYPAHGLARPRGPGSRKGLHEPYSESDDDWC

SEQ ID NO: 97 - protein, 2339 aa, Homo sapiens [sequence omitted]

SEQ ID NO: 98 - protein, 2221 aa, Homo sapiens
MVNENTRMYIPEENHQGSNYGSPRPAHANMNANAAAGLAPEHIPTPGAALSWQAAIDAARQAKLMGSAGNATISTVSSTQRKRQQYGKPKKQGSTTATRPPRALLCLTLKNPIRRACISIVEWKPFEIIILLTIFANCVALAIYIPFPEDDSNATNSNLERVEYLFLIIFTVEAFLKVIAYGLLFHPNAYLRNGWNLLDFIIVVVGLFSAILEQATKADGANALGGKGAGFDVKALRAFRVLRPLRLVSGVPSLQVVLNSIIKAMVPLLHIALLVLFVIIIYAIIGLELFMGKMHKTCYNQEGIADVPAEDDPSPCALETGHGRQCQNGTVCKPGWDGPKHGITNFDNFAFAMLTVFQCITMEGWTDVLYWVNDAVGRDWPWIYFVTLIIIGSFFVLNLVLGVLSGEFSKEREKAKARGDFQKLREKQQLEEDLKGYLDWITQAEDIDPENEDEGMDEEKPRNMSMPTSETESVNTENVAGGDIEGENCGARLAHRISKSKFSRYWRRWNRFCRRKCRAAVKSNVFYWLVIFLVFLNTLTIASEHYNQPNWLTEVQDTANKALLALFTAEMLLKMYSLGLQAYFVSLFNRFDCFVVCGGILETILVETKIMSPLGISVLRCVRLLRIFKITRYWNSLSNLVASLLNSVRSIASLLLLLFLFIIIFSLLGMQLFGGKFNFDEMQTRRSTFDNFPQSLLTVFQILTGEDWNSVMYDGIMAYGGPSFPGMLVCIYFIILFICGNYILLNVFLAIAVDNLADAESLTSAQKEEEEEKERKKLARTASPEKKQELVEKPAVGESKEEKIELKSITADGESPPATKINMDDLQPNENEDKSPYPNPETTGEEDEEEPEMPVGPRPRPLSELHLKEKAVPMPEASAFFIFSSNNRFRLQCHRIVNDTIFTNLILFFILLSSISLAAEDPVQHTSFRNHILFYFDIVFTTIFTIEIALKILGNADYVFTSIFTLEIILKMTAYGAFLHKGSFCRNYFNILDLLVVSVSLISFGIQSSAINVVKILRVLRVLRPLRAINRAKGLKHVVQCVFVAIRTIGNIVIVTTLLQFMFACIGVQLFKGKLYTCSDSSKQTEAECKGNYITYKDGEVDHPIIQPRSWENSKFDFDNVLAAMMALFTVSTFEGWPELLYRSIDSHTEDKGPIYNYRVEISIFFIIYIIIIAFFMMNIFVGFVIVTFQEQGEQEYKNCELDKNQRQCVEYALKARPLRRYIPKNQHQYKVWYVVNSTYFEYLMFVLILLNTICLAMQHYGQSCLFKIAMNILNMLFTGLFTVEMILKLIAFKPKGYFSDPWNVFDFLIVIGSIIDVILSETNHYFCDAWNTFDALIVVGSIVDIAITEVNPAEHTQCSPSMNAEENSRISITFFRLFRVMRLVKLLSRGEGIRTLLWTFIKSFQALPYVALLIVMLFFIYAVIGMQVFGKIALNDTTEINRNNNFQTFPQAVLLLFRCATGEAWQDIMLACMPGKKCAPESEPSNSTEGETPCGSSFAVFYFISFYMLCAFLIINLFVAVIMDNFDYLTRDWSILGPHHLDEFKRIWAEYDPEAKGRIKHLDVVTLLRRIQPPLGFGKLCPHRVACKRLVSMNMPLNSDGTVMFNATLFALVRTALRIKTEGNLEQANEELRAIIKKIWKRTSMKLLDQVVPPAGDDEVTVGKFYATFLIQEYFRKFKKRKEQGLVGKPSQRNALSLQAGLRTLHDIGPEIRRAISGDLTAEEELDKAMKEAVSAASEDDIFRRAGGLFGNHVSYYQSDGRSAFPQTFTTQRPLHINKAGSSQGDTESPSHEKLVDSTFTPSSYSSTGSNANINNANNTALGRLPRPAGYPSTVSTVEGHGPPLSPAIRVQEVAWKLSSNRERHVPMCEDLELRRDSGSAGTQAHCLLLRRANPSRCHSRESQAAMAGQEETSQDETYEVKMNHDTEACSEPSLLSTEMLSYQDDENRQLTLPEEDKRDIRQSPKRGFLRSASLGRRASFHLECLKRQKDRGGDISQKTVLPLHLVHHQALAVAGLSPLLQRSHSPASFPRPFATPPATPGSRGWPPQPVPTLRLEGVESSEKLNSSFPSIHCGSWAETTPGGGGSSAARRVRPVSLMVPSQAGAPGRQFHGSASSLVEAVLISEGLGQFAQDPKFIEVTTQELADACDMTIEEMESAADNILSGGAPQSPNGALLPFVNCRDAGQDRAGGEEDAGCVRARGRPSEEELQDSRVYVSSL

SEQ ID NO: 99 - protein, 2181 aa, Homo sapiens
MMMMMMMKKMQHQRQQQADHANEANYARGTRLPLSGEGPTSQPNSSKQTVLSWQAAIDAARQAKAAQTMSTSAPPPVGSLSQRKRQQYAKSKKQGNSSNSRPARALFCLSLNNPIRRACISIVEWKPFDIFILLAIFANCVALAIYIPFPEDDSNSTNHNLEKVEYAFLIIFTVETFLKIIAYGLLLHPNAYVRNGWNLLDFVIVIVGLFSVILEQLTKETEGGNHSSGKSGGFDVKALRAFRVLRPLRLVSGVPSLQVVLNSIIKAMVPLLHIALLVLFVIIIYAIIGLELFIGKMHKTCFFADSDIVAEEDPAPCAFSGNGRQCTANGTECRSGWVGPNGGITNFDNFAFAMLTVFQCITMEGWTDVLYWVNDAIGWEWPWVYFVSLIILGSFFVLNLVLGVLSGEFSKEREKAKARGDFQKLREKQQLEEDLKGYLDWITQAEDIDPENEEEGGEEGKRNTSMPTSETESVNTENVSGEGENRGCCGSLWCWWRRRGAAKAGPSGCRRWGQAISKSKLSRRWRRWNRFNRRRCRAAVKSVTFYWLVIVLVFLNTLTISSEHYNQPDWLTQIQDIANKVLLALFTCEMLVKMYSLGLQAYFVSLFNRFDCFVVCGGITETILVELEIMSPLGISVFRCVRLLRIFKVTRHWTSLSNLVASLLNSMKSIASLLLLLFLFIIIFSLLGMQLFGGKFNFDETQTKRSTFDNFPQALLTVFQILTGEDWNAVMYDGIMAYGGPSSSGMIVCIYFIILFICGNYILLNVFLAIAVDNLADAESLNTAQKEEAEEKERKKIARKESLENKKNNKPEVNQIANSDNKVTIDDYREEDEDKDPYPPCDVPVGEEEEEEEEDEPEVPAGPRPRRISELNMKEKIAPIPEGSAFFILSKTNPIRVGCHKLINHHIFTNLILVFIMLSSAALAAEDPIRSHSFRNTILGYFDYAFTAIFTVEILLKMTTFGAFLHKGAFCRNYFNLLDMLVVGVSLVSFGIQSSAISVVKILRVLRVLRPLRAINRAKGLKHVVQCVFVAIRTIGNIMIVTTLLQFMFACIGVQLFKGKFYRCTDEAKSNPEECRGLFILYKDGDVDSPVVRERIWQNSDFNFDNVLSAMMALFTVSTFEGWPALLYKAIDSNGENIGPIYNHRVEISIFFIIYIIIVAFFMMNIFVGFVIVTFQEQGEKEYKNCELDKNQRQCVEYALKARPLRRYIPKNPYQYKFWYVVNSSPFEYMMFVLIMLNTLCLAMQHYEQSKMFNDAMDILNMVFTGVFTVEMVLKVIAFKPKGYFSDAWNTFDSLIVIGSIIDVALSEADPTESENVPVPTATPGNSEESNRISITFFRLFRVMRLVKLLSRGEGIRTLLWTFIKSFQALPYVALLIAMLFFIYAVIGMQMFGKVAMRDNNQINRNNNFQTFPQAVLLLFRCATGEAWQEIMLACLPGKLCDPESDYNPGEEYTCGSNFAIVYFISFYMLCAFLIINLFVAVIMDNFDYLTRDWSILGPHHLDEFKRIWSEYDPEAKGRIKHLDVVTLLRRIQPPLGFGKLCPHRVACKRLVAMNMPLNSDGTVMFNATLFALVRTALKIKTEGNLEQANEELRAVIKKIWKKTSMKLLDQVVPPAGDDEVTVGKFYATFLIQDYFRKFKKRKEQGLVGKYPAKNTTIALQAGLRTLHDIGPEIRRAISCDLQDDEPEETKREEEDDVFKRNGALLGNHVNHVNSDRRDSLQQTNTTHRPLHVQRPSIPPASDTEKPLFPPAGNSVCHNHHNHNSIGKQVPTSTNANLNNANMSKAAHGKRPSIGNLEHVSENGHHSSHKHDREPQRRSSVKRTRYYETYIRSDSGDEQLPTICREDPEIHGYFRDPHCLGEQEYFSSEECYEDDSSPTWSRQNYGYYSRYPGRNIDSERPRGYHHPQGFLEDDDSPVCYDSRRSPRRRLLPPTPASHRRSSFNFECLRRQSSQEEVPSSPIFPHRTALPLHLMQQQIMAVAGLDSSKAQKYSPSHSTRSWATPPATPPYRDWTPCYTPLIQVEQSEALDQVNGSLPSLHRSSWYTDEPDISYRTFTPASLTVPSSFRNKNSDKQRSADSLVEAVLISEGLGRYARDPKFVSATKHEIADACDLTIDEMESAASTLLNGNVRPRANGDVGPLSHRQDYELQDFGPGYSDEEPDPGRDEEDLADEMICITTL

SEQ ID NO: 100 - protein, 2313 aa, Homo sapiens
MARFGEAVVARPGSGDGDSDQSRNRQGTPVPASGQAAAYKQTKAQRARTMALYNPIPVRQNCFTVNRSLFIFGEDNIVRKYAKKLIDWPPFEYMILATIIANCIVLALEQHLPEDDKTPMSRRLEKTEPYFIGIFCFEAGIKIVALGFIFHKGSYLRNGWNVMDFIVVLSGILATAGTHFNTHVDLRTLRAVRVLRPLKLVSGIPSLQIVLKSIMKAMVPLLQIGLLLFFAILMFAIIGLEFYSGKLHRACFMNNSGILEGFDPPHPCGVQGCPAGYECKDWIGPNDGITQFDNILFAVLTVFQCITMEGWTTVLYNTNDALGATWNWLYFIPLIIIGSFFVLNLVLGVLSGEFAKERERVENRRAFMKLRRQQQIERELNGYRAWIDKAEEVMLAEENKNAGTSALEVLRRATIKRSRTEAMTRDSSDEHCVDISSVGTPLARASIKSAKVDGVSYFRHKERLLRISIRHMVKSQVFYWIVLSLVALNTACVAIVHHNQPQWLTHLLYYAEFLFLGLFLLEMSLKMYGMGPRLYFHSSFNCFDFGVTVGSIFEVVWAIFRPGTSFGISVLRALRLLRIFKITKYWASLRNLVVSLMSSMKSIISLLFLLFLFIVVFALLGMQLFGGRFNFNDGTPSANFDTFPAAIMTVFQILTGEDWNEVMYNGIRSQGGVSSGMWSAIYFIVLTLFGNYTLLNVFLAIAVDNLANAQELTKDEQEEEEAFNQKHALQKAKEVSPMSAPNMPSIERDRRRRHHMSMWEPRSSHLRERRRRHHMSVWEQRTSQLRKHMQMSSQEALNREEAPTMNPLNPLNPLSSLNPLNAHPSLYRRPRAIEGLALGLALEKFEEERISRGGSLKGDGGDRSSALDNQRTPLSLGQREPPWLARPCHGNCDPTQQEAGGGEAVVTFEDRARHRQSQRRSRHRRVRTEGKESSSASRSRSASQERSLDEAMPTEGEKDHELRGNHGAKEPTIQEERAQDLRRTNSLMVSRGSGLAGGLDEADTPLVLPHPELEVGKHVVLTEQEPEGSSEQALLGNVQLDMGRVISQSEPDLSCITANTDKATTESTSVTVAIPDVDPLVDSTVVHISNKTDGEASPLKEAEIREDEEEVEKKKQKKEKRETGKAMVPHSSMFIFSTTNPIRRACHYIVNLRYFEMCILLVIAASSIALAAEDPVLTNSERNKVLRYFDYVFTGVFTFEMVIKMIDQGLILQDGSYFRDLWNILDFVVVVGALVAFALANALGTNKGRDIKTIKSLRVLRVLRPLKTIKRLPKLKAVFDCVVTSLKNVFNILIVYKLFMFIFAVIAVQLFKGKFFYCTDSSKDTEKECIGNYVDHEKNKMEVKGREWKRHEFHYDNIIWALLTLFTVSTGEGWPQVLQHSVDVTEEDRGPSRSNRMEMSIFYVVYFVVFPFFFVNIFVALIIITFQEQGDKMMEECSLEKNERACIDFAISAKPLTRYMPQNRHTFQYRVWHFVVSPSFEYTIMAMIALNTVVLMMKYYSAPCTYELALKYLNIAFTMVFSLECVLKVIAFGFLNYFRDTWNIFDFITVIGSITEIILTDSKLVNTSGFNMSFLKLFRAARLIKLLRQGYTIRILLWTFVQSFKALPYVCLLIAMLFFIYAIIGMQVFGNIKLDEESHINRHNNFRSFFGSLMLLFRSATGEAWQEIMLSCLGEKGCEPDTTAPSGQNENERCGTDLAYVYFVSFIFFCSFLMLNLFVAVIMDNFEYLTRDSSILGPHHLDEFVRVWAEYDRAACGRIHYTEMYEMLTLMSPPLGLGKRCPSKVAYKRLVLMNMPVAEDMTVHFTSTLMALIRTALDIKIAKGGADRQQLDSELQKETLAIWPHLSQKMLDLLVPMPKASDLTVGKIYAAMMIMDYYKQSKVKKQRQQLEEQKNAPMFQRMEPSSLPQEIIANAKALPYLQQDPVSGLSGRSGYPSMSPLSPQDIFQLACMDPADDGQFQERQSLEPEVSELKSVQPSNHGIYLPSDTQEHAGSGRASSMPRLTVDPQVVTDPSSMRRSFSTIRDKRSNSSWLEEFSMERSSENTYKSRRRSYHSSLRLSAHRLNSDSGHKSDTHRSGGRERGRSKERKHLLSPDVSRCNSEERGTQADWESPERRQSRSPSEGRSQTPNRQGTGSLSESSIPSVSDTSTPRRSRRQLPPVPPKPRPLLSYSSLIRHAGSISPPADGSEEGSPLTSQALESNNACLTESSNSPHPQQSQHASPQRYISEPYLALHEDSHASDCGEEETLTFEAAVATSLGRSNTIGSAPPLRHSWQMPNGHYRRRRRGGPGPGMMCGAVNNLLSDTEEDDKC

SEQ ID NO: 101 - protein, 1977 aa, Homo sapiens
MSESEGGKDTTPEPSPANGAGPGPEWGLCPGPPAVEGESSGASGLGTPKRRNQHSKHKTVAVASAQRSPRALFCLTLANPLRRSCISIVEWKPFDILILLTIFANCVALGVYIPFPEDDSNTANHNLEQVEYVFLVIFTVETVLKIVAYGLVLHPSAYIRNGWNLLDFIIVVVGLFSVLLEQGPGRPGDAPHTGGKPGGFDVKALRAFRVLRPLRLVSGVPSLHIVLNSIMKALVPLLHIALLVLFVIIIYAIIGLELFLGRMHKTCYFLGSDMEAEEDPSPCASSGSGRACTLNQTECRGRWPGPNGGITNFDNFFFAMLTVFQCVTMEGWTDVLYWMQDAMGYELPWVYFVSLVIFGSFFVLNLVLGVLSGEFSKEREKAKARGDFQKQREKQQMEEDLRGYLDWITQAEELDMEDPSADDNLGSMAEEGRAGHRPQLAELTNRRRGRLRWFSHSTRSTHSTSSHASLPASDTGSMTETQGDEDEEEGALASCTRCLNKIMKTRVCRRLRRANRVLRARCRRAVKSNACYWAVLLLVFLNTLTIASEHHGQPVWLTQIQEYANKVLLCLFTVEMLLKLYGLGPSAYVSSFFNRFDCFVVCGGILETTLVEVGAMQPLGISVLRCVRLLRIFKVTRHWASLSNLVASLLNSMKSIASLLLLLFLFIIIFSLLGMQLFGGKFNFDQTHTKRSTFDTFPQALLTVFQILTGEDWNVVMYDGIMAYGGPFFPGMLVCIYFIILFICGNYILLNVFLAIAVDNLASGDAGTAKDKGGEKSNEKDLPQENEGLVPGVEKEEEEGARREGADMEEEEEEEEEEEEEEEEEGAGGVELLQEVVPKEKVVPIPEGSAFFCLSQTNPLRKGCHTLIHHHVFTNLILVFIILSSVSLAAEDPIRAHSFRNHILGYFDYAFTSIFTVEILLKMTVFGAFLHRGSFCRSWFNMLDLLVVSVSLISFGIHSSAISVVKILRVLRVLRPLRAINRAKGLKHVVQCVFVAIRTIGNIMIVTTLLQFMFACIGVQLFKGKFYTCTDEAKHTPQECKGSFLVYPDGDVSRPLVRERLWVNSDFNFDNVLSAMMALFTVSTFEGWPALLYKAIDAYAEDHGPIYNYRVEISVFFIVYIIIIAFFMMNIFVGFVIITFRAQGEQEYQNCELDKNQRQCVEYALKAQPLRRYIPKNPHQYRVWATVNSAAFEYLMFLLILLNTVALAMQHYEQTAPFNYAMDILNMVFTGLFTIEMVLKIIAFKPKHYFTDAWNTFDALIVVGSIVDIAVTEVNNGGHLGESSEDSSRISITFFRLFRVMRLVKLLSKGEGIRTLLWTFIKSFQALPYVALLIAMIFFIYAVIGMQMFGKVALQDGTQINRNNNFQTFPQAVLLLFRCATGEAWQEIMLASLPGNRCDPESDFGPGEEFTCGSNFAIAYFISFFMLCAFLIINLFVAVIMDNFDYLTRDWSILGPHHLDEFKRIWSEYDPGAKGRIKHLDVVALLRRIQPPLGFGKLCPHRVACKRLVAMNMPLNSDGTVTFNATLFALVRTSLKIKTEGNLEQANQELRIVIKKIWKRMKQKLLDEVIPPPDEEEVTVGKFYATFLIQDYFRKFRRRKEKGLLGNDAAPSTSSALQAGLRSLQDLGPEMRQALTCDTEEEEEEGQEGVEEEDEKDLETNKATMVSQPSARRGSGISVSLPVGDRLPDSLSFGPSDDDRGTPTSSQPSVPQAGSNTHRRGSGALIFTIPEEGNSQPKGTKGQNKQDEDEEVPDRLSYLDEQAGTPPCSVLLPPHRAQRYMDGHLVPRRRLLPPTPAGRKPSFTIQCLQRQGSCEDLPIPGTYHRGRNSGPNRAQGSWATPPQRGRLLYAPLLLVEEGAAGEGYLGRSSGPLRTFTCLHVPGTHSDPSHGKRGSADSLVEAVLISEGLGLFARDPRFVALAKQEIADACRLTLDEMDNAASDLLAQGTSSLYSDEESILSRFDEEDLGDEMACVHAL

SEQ ID NO: 102 - protein, 2377 aa, Homo sapiens
MDEEEDGAGAEESGQPRSFMRLNDLSGAGGRPGPGSAEKDPGSADSEAEGLPYPALAPVVFFYLSQDSRPRSWCLRTVCNPWFERISMLVILLNCVTLGMFRPCEDIACDSQRCRILQAFDDFIFAFFAVEMVVKMVALGIFGKKCYLGDTWNRLDFFIVIAGMLEYSLDLQNVSFSAVRTVRVLRPLRAINRVPSMRILVTLLLDTLPMLGNVLLLCFFVFFIFGIVGVQLWAGLLRNRCFLPENFSLPLSVDLERYYQTENEDESPFICSQPRENGMRSCRSVPTLRGDGGGGPPCGLDYEAYNSSSNTTCVNWNQYYTNCSAGEHNPFKGAINFDNIGYAWIAIFQVITLEGWVDIMYFVMDAHSFYNFIYFILLIIVGSFFMINLCLVVIATQFSETKQRESQLMREQRVRFLSNASTLASFSEPGSCYEELLKYLVYILRKAARRLAQVSRAAGVRVGLLSSPAPLGGQETQPSSSCSRSHRRLSVHHLVHHHHHHHHHYHLGNGTLRAPRASPEIQDRDANGSRRLMLPPPSTPALSGAPPGGAESVHSFYHADCHLEPVRCQAPPPRSPSEASGRTVGSGKVYPTVHTSPPPETLKEKALVEVAASSGPPTLTSLNIPPGPYSSMHKLLETQSTGACQSSCKISSPCLKADSGACGPDSCPYCARAGAGEVELADREMPDSDSEAVYEFTQDAQHSDLRDPHSRRQRSLGPDAEPSSVLAFWRLICDTFRKIVDSKYFGRGIMIAILVNTLSMGIEYHEQPEELTNALEISNIVFTSLFALEMLLKLLVYGPFGYIKNPYNIFDGVIVVISVWEIVGQQGGGLSVLRTFRLMRVLKLVRFLPALQRQLVVLMKTMDNVATFCMLLMLFIFIFSILGMHLFGCKFASERDGDTLPDRKNFDSLLWAIVTVFQILTQEDWNKVLYNGMASTSSWAALYFIALMTFGNYVLFNLLVAILVEGFQAEEISKREDASGQLSCIQLPVDSQGGDANKSESEPDFFSPSLDGDGDRKKCLALVSLGEHPELRKSLLPPLIIHTAATPMSLPKSTSTGLGEALGPASRRTSSSGSAEPGAAHEMKSPPSARSSPHSPWSAASSWTSRRSSRNSLGRAPSLKRRSPSGERRSLLSGEGQESQDEEESSEEERASPAGSDHRHRGSLEREAKSSFDLPDTLQVPGLHRTASGRGSASEHQDCNGKSASGRLARALRPDDPPLDGDDADDEGNLSKGERVRAWIRARLPACCLERDSWSAYIFPPQSRFRLLCHRIITHKMFDHVVLVIIFLNCITIAMERPKIDPHSAERIFLTLSNYIFTAVFLAEMTVKVVALGWCFGEQAYLRSSWNVLDGLLVLISVIDILVSMVSDSGTKILGMLRVLRLLRTLRPLRVISRAQGLKLVVETLMSSLKPIGNIVVICCAFFIIFGILGVQLFKGKFFVCQGEDTRNITNKSDCAEASYRWVRHKYNFDNLGQALMSLFVLASKDGWVDIMYDGLDAVGVDQQPIMNHNPWMLLYFISFLLIVAFFVLNMFVGVVVENFHKCRQHQEEEEARRREEKRLRRLEKKRRNLMLDDVIASGSSASAASEAQCKPYYSDYSRFRLLVHHLCTSHYLDLFITGVIGLNVVTMAMEHYQQPQILDEALKICNYIFTVIFVLESVFKLVAFGFRRFFQDRWNQLDLAIVLLSIMGITLEEIEVNASLPINPTIIRIMRVLRIARVLKLLKMAVGMRALLDTVMQALPQVGNLGLLFMLLFFIFAALGVELFGDLECDETHPCEGLGRHATFRNFGMAFLTLFRVSTGDNWNGIMKDTLRDCDQESTCYNTVISPIYFVSFVLTAQFVLVNVVIAVLMKHLEESNKEAKEEAELEAELELEMKTLSPQPHSPLGSPFLWPGVEGPDSPDSPKPGALHPAAHARSASHFSLEHPTDRQLFDTISLLIQGSLEWELKLMDELAGPGGQPSAFPSAPSLGGSDPQIPLAEMEALSLTSEIVSEPSCSLALTDDSLPDDMHTLLLSALESNMQPHPTELPGPDLLTVRKSGVSRTHSLPNDSYMCRHGSTAEGPLGHRGWGLPKAQSGSVLSVHSQPADTSYILQLPKDAPHLLQPHSAPTWGTIPKLPPPGRSPLAQRPLRRQAAIRTDSLDVQGLGSREDLLAEVSGPSPPLARAYSFWGQSSTQAQQHSRSHSKISKHMTPPAPCPGPEPNWGKGPPETRSSLELDTELSWISGDLLPPGGQEEPPSPRDLKKCYSVEAQSCQRRPTSWLDEQRRHSIAVSCLDSGSQPHLGTDPSNLGGQPLGGPGSRPKKKLSPPSITIDPPESQGPRTPPSPGICLRRRAPSSDSKDPLASGPPDSMAASPSPKKDVLSLSGLSSDPADLDP

SEQ ID NO: 103 - protein, 2353 aa, Homo sapiens
MTEGARAADEVRVPLGAPPPGPAALVGASPESPGAPGREAERGSELGVSPSESPAAERGAELGADEEQRVPYPALAATVFFCLGQTTRPRSWCLRLVCNPWFEHVSMLVIMLNCVTLGMFRPCEDVECGSERCNILEAFDAFIFAFFAVEMVIKMVALGLFGQKCYLGDTWNRLDFFIVVAGMMEYSLDGHNVSLSAIRTVRVLRPLRAINRVPSMRILVTLLLDTLPMLGNVLLLCFFVFFIFGIVGVQLWAGLLRNRCFLDSAFVRNNNLTFLRPYYQTEEGEENPFICSSRRDNGMQKCSHIPGRRELRMPCTLGWEAYTQPQAEGVGAARNACINWNQYYNVCRSGDSNPHNGAINFDNIGYAWIAIFQVITLEGWVDIMYYVMDAHSFYNFIYFILLIIVGSFFMINLCLVVIATQFSETKQRESQLMREQRARHLSNDSTLASFSEPGSCYEELLKYVGHIFRKVKRRSLRLYARWQSRWRKKVDPSAVQGQGPGHRQRRAGRHTASVHHLVYHHHHHHHHHYHFSHGSPRRPGPEPGACDTRLVRAGAPPSPPSPGRGPPDAESVHSIYHADCHIEGPQERARVAHAAATAAASLRLATGLGTMNYPTILPSGVGSGKGSTSPGPKGKWAGGPPGTGGHGPLSLNSPDPYEKIPHVVGEHGLGQAPGHLSGLSVPCPLPSPPAGTLTCELKSCPYCTRALEDPEGELSGSESGDSDGRGVYEFTQDVRHGDRWDPTRPPRATDTPGPGPGSPQRRAQQRAAPGEPGWMGRLWVTFSGKLRRIVDSKYFSRGIMMAILVNTLSMGVEYHEQPEELTNALEISNIVFTSMFALEMLLKLLACGPLGYIRNPYNIFDGIIVVISVWEIVGQADGGLSVLRTFRLLRVLKLVRFLPALRRQLVVLVKTMDNVATFCTLLMLFIFIFSILGMHLFGCKFSLKTDTGDTVPDRKNFDSLLWAIVTVFQILTQEDWNVVLYNGMASTSSWAALYFVALMTFGNYVLFNLLVAILVEGFQAEGDANRSDTDEDKTSVHFEEDFHKLRELQTTELKMCSLAVTPNGHLEGRGSLSPPLIMCTAATPMPTPKSSPFLDAAPSLPDSRRGSSSSGDPPLGDQKPPASLRSSPCAPWGPSGAWSSRRSSWSSLGRAPSLKRRGQCGERESLLSGEGKGSTDDEAEDGRAAPGPRATPLRRAESLDPRPLRPAALPPTKCRDRDGQVVALPSDFFLRIDSHREDAAELDDDSEDSCCLRLHKVLEPYKPQWCRSREAWALYLFSPQNRFRVSCQKVITHKMFDHVVLVFIFLNCVTIALERPDIDPGSTERVFLSVSNYIFTAIFVAEMMVKVVALGLLSGEHAYLQSSWNLLDGLLVLVSLVDIVVAMASAGGAKILGVLRVLRLLRTLRPLRVISRAPGLKLVVETLISSLRPIGNIVLICCAFFIIFGILGVQLFKGKFYYCEGPDTRNISTKAQCRAAHYRWVRRKYNFDNLGQALMSLFVLSSKDGWVNIMYDGLDAVGVDQQPVQNHNPWMLLYFISFLLIVSFFVLNMFVGVVVENFHKCRQHQEAEEARRREEKRLRRLERRRRSTFPSPEAQRRPYYADYSPTRRSIHSLCTSHYLDLFITFIICVNVITMSMEHYNQPKSLDEALKYCNYVFTIVFVFEAALKLVAFGFRRFFKDRWNQLDLAIVLLSLMGITLEEIEMSAALPINPTIIRIMRVLRIARVLKLLKMATGMRALLDTVVQALPQVGNLGLLFMLLFFIYAALGVELFGRLECSEDNPCEGLSRHATFSNFGMAFLTLFRVSTGDNWNGIMKDTLRECSREDKHCLSYLPALSPVYFVTFVLVAQFVLVNVVVAVLMKHLEESNKEAREDAELDAEIELEMAQGPGSARRVDADRPPLPQESPGARDAPNLVARKVSVSRMLSLPNDSYMFRPVVPASAPHPRPLQEVEMETYGAGTPLGSVASVHSPPAESCASLQIPLAVSSPARSGEPLHALSPRGTARSPSLSRLLCRQEAVHTDSLEGKIDSPRDTLDPAEPGEKTPVRPVTQGGSLQSPPRSPRPASVRTRKHTFGQRCVSSRPAAPGGEEAEASDPADEEVSHITSSACPWQPTAEPHGPEASPVAGGERDLRRLYSVDAQGFLDKPGRADEQWRPSAELGSGEPGEAKAWGPEAEPALGARRKKKMSPPCISVEPPAEDEGSARPSAAEGGSTTLRRRTPSCEATPHRDSLEPTEGSGAGGDPAAKGERWGQASCRAEHLTVPSFAFEPLDLGVPSGDPFLDGSHSVTPESRASSSGAIVPLEPPESEPPMPVGDPPEKRRGLYLTVPQCPLEKPGSPSATPAPGGGADDPV

SEQ ID NO: 104 - protein, 2223 aa, Homo sapiens
MAESASPPSSSAAAPAAEPGVTTEQPGPRSPPSSPPGLEEPLDGADPHVPHPDLAPIAFFCLRQTTSPRNWCIKMVCNPWFECVSMLVILLNCVTLGMYQPCDDMDCLSDRCKILQVFDDFIFIFFAMEMVLKMVALGIFGKKCYLGDTWNRLDFFIVMAGMVEYSLDLQNINLSAIRTVRVLRPLKAINRVPSMRILVNLLLDTLPMLGNVLLLCFFVFFIFGIIGVQLWAGLLRNRCFLEENFTIQGDVALPPYYQPEEDDEMPFICSLSGDNGIMGCHEIPPLKEQGRECCLSKDDVYDFGAGRQDLNASGLCVNWNRYYNVCRTGSANPHKGAINFDNIGYAWIVIFQVITLEGWVEIMYYVMDAHSFYNFIYFILLIIVGSFFMINLCLVVIATQFSETKQREHRLMLEQRQRYLSSSTVASYAEPGDCYEEIFQYVCHILRKAKRRALGLYQALQSRRQALGPEAPAPAKPGPHAKEPRHYHGKTKGQGDEGRHLGSRHCQTLHGPASPGNDHSGRELCPQHSPLDATPHTLVQPIPATLASDPASCPCCQHEDGRRPSGLGSTDSGQEGSGSGSSAGGEDEADGDGARSSEDGASSELGKEEEEEEQADGAVWLCGDVWRETRAKLRGIVDSKYFNRGIMMAILVNTVSMGIEHHEQPEELTNILEICNVVFTSMFALEMILKLAAFGLFDYLRNPYNIFDSIIVIISIWEIVGQADGGLSVLRTFRLLRVLKLVRFMPALRRQLVVLMKTMDNVATFCMLLMLFIFIFSILGMHIFGCKFSLRTDTGDTVPDRKNFDSLLWAIVTVFQILTQEDWNVVLYNGMASTSPWASLYFVALMTFGNYVLFNLLVAILVEGFQAEGDANRSYSDEDQSSSNIEEFDKLQEGLDSSGDPKLCPIPMTPNGHLDPSLPLGGHLGPAGAAGPAPRLSLQPDPMLVALGSRKSSVMSLGRMSYDQRSLSSSRSSYYGPWGRSAAWASRRSSWNSLKHKPPSAEHESLLSAERGGGARVCEVAADEGPPRAAPLHTPHAHHIHHGPHLAHRHRHHRRTLSLDNRDSVDLAELVPAVGAHPRAAWRAAGPAPGHEDCNGRMPSIAKDVFTKMGDRGDRGEDEEEIDYTLCFRVRKMIDVYKPDWCEVREDWSVYLFSPENRFRVLCQTIIAHKLFDYVVLAFIFLNCITIALERPQIEAGSTERIFLTVSNYIFTAIFVGEMTLKVVSLGLYFGEQAYLRSSWNVLDGFLVFVSIIDIVVSLASAGGAKILGVLRVLRLLRTLRPLRVISRAPGLKLVVETLISSLKPIGNIVLICCAFFIIFGILGVQLFKGKFYHCLGVDTRNITNRSDCMAANYRWVHHKYNFDNLGQALMSLFVLASKDGWVNIMYNGLDAVAVDQQPVTNHNPWMLLYFISFLLIVSFFVLNMFVGVVVENFHKCRQHQEAEEARRREEKRLRRLEKKRRKAQRLPYYATYCHTRLLIHSMCTSHYLDIFITFIICLNVVTMSLEHYNQPTSLETALKYCNYMFTTVFVLEAVLKLVAFGLRRFFKDRWNQLDLAIVLLSVMGITLEEIEINAALPINPTIIRIMRVLRIARVLKLLKMATGMRALLDTVVQALPQVGNLGLLFMLLFFIYAALGVELFGKLVCNDENPCEGMSRHATFENFGMAFLTLFQVSTGDNWNGIMKDTLRDCTHDERSCLSSLQFVSPLYFVSFVLTAQFVLINVVVAVLMKHLDDSNKEAQEDAEMDAELELEMAHGLGPGPRLPTGSPGAPGRGPGGAGGGGDTEGGLCRRCYSPAQENLWLDSVSLIIKDSLEGELTIIDNLSGSIFHHYSSPAGCKKCHHDKQEVQLAETEAFSLNSDRSSSILLGDDLSLEDPTACPPGRKDSKGELDPPEPMRVGDLGECFFPLSSTAVSPDPENFLCEMEEIPFNPVRSWLKHDSSQAPPSPFSPDASSPLLPMPAEFFHPAVSASQKGPEKGTGTGTLPKIALQGSWASLRSPRVNCTLLRQATGSDTSLDASPSSSAGSLQTTLEDSLTLSDSPRRALGPPAPAPGPRAGLSPAARRRLSLRGRGLFSLRGLRAHQRSHSSGGSTSPGCTHHDSMDPSDEEGRGGAGGGGAGSEHSETLSSLSLTSLFCPPPPPPAPGLTPARKFSSTSSLAAPGRPHAAALAHGLARSPSWAADRSKDPPGRAPLPMGLGPLAPPPQPLPGELEPGDAASKRKR

SEQ ID NO: 105 - protein, 1091 aa, Homo sapiens
MAGPGSPRRASRGASALLAAALLYAALGDVVRSEQQIPLSVVKLWASAFGGEIKSIAAKYSGSQLLQKKYKEYEKDVAIEEIDGLQLVKKLAKNMEEMFHKKSEAVRRLVEAAEEAHLKHEFDADLQYEYFNAVLINERDKDGNFLELGKEFILAPNDHFNNLPVNISLSDVQVPTNMYNKDPAIVNGVYWSESLNKVFVDNFDRDPSLIWQYFGSAKGFFRQYPGIKWEPDENGVIAFDCRNRKWYIQAATSPKDVVILVDVSGSMKGLRLTIAKQTVSSILDTLGDDDFFNIIAYNEELHYVEPCLNGTLVQADRTNKEHFREHLDKLFAKGIGMLDIALNEAFNILSDFNHTGQGSICSQAIMLITDGAVDTYDTIFAKYNWPDRKVRIFTYLIGREAAFADNLKWMACANKGFFTQISTLADVQENVMEYLHVLSRPKVIDQEHDVVWTEAYIDSTLPQAQKLTDDQGPVLMTTVAMPVFSKQNETRSKGILLGVVGTDVPVKELLKTIPKYKLGIHGYAFAITNNGYILTHPELRLLYEEGKKRRKPNYSSVDLSEVEWEDRDDVLRNAMVNRKTGKFSMEVKKTVDKGKRVLVMTNDYYYTDIKGTPFSLGVALSRGHGKYFFRGNVTIEEGLHDLEHPDVSLADEWSYCNTDLHPEHRHLSQLEAIKLYLKGKEPLLQCDKELIQEVLFDAVVSAPIEAYWTSLALNKSENSDKGVEVAFLGTRTGLSRINLFVGAEQLTNQDFLKAGDKENIFNADHFPLWYRRAAEQIPGSFVYSIPFSTGPVNKSNVVTASTSIQLLDERKSPVVAAVGIQMKLEFFQRKFWTASRQCASLDGKCSISCDDETVNCYLIDNNGFILVSEDYTQTGDFFGEIEGAVMNKLLTMGSFKRITLYDYQAMCRANKESSDGAHGLLDPYNAFLSAVKWIMTELVLFLVEFNLCSWWHSDMTAKAQKLKQTLEPCDTEYPAFVSERTIKETTGNIACEDCSKSFVIQQIPSSNLFMVVVDSSCLCESVAPITMAPIEIRYNESLKCERLKAQKIRRRPESCHGFHPEENARECGGAPSLQAQTVLLLLPLLLMLFSR

SEQ ID NO: 106 - protein, 660 aa, Homo sapiens
MVQRDMSKSPPTAAAAVAQEIQMELLENVAPAGALGAAAQSYGKGARRKNRFKGSDGSTSSDTTSNSFVRQGSADSYTSRPSDSDVSLEEDREAVRREAERQAQAQLEKAKTKPVAFAVRTNVSYSAAHEDDVPVPGMAISFEAKDFLHVKEKFNNDWWIGRLVKEGCEIGFIPSPVKLENMRLQHEQRAKQGKFYSSKSGGNSSSSLGDIVPSSRKSTPPSSAIDIDATGLDAEENDIPANHRSPKPSANSVTSPHSKEKRMPFFKKTEHTPPYDVVPSMRPVVLVGPSLKGYEVTDMMQKALFDFLKHRFEGRISITRVTADISLAKRSVLNNPSKHAIIERSNTRSSLAEVQSEIERIFELARTLQLVVLDADTINHPAQLSKTSLAPIIVYVKISSPKVLQRLIKSRGKSQAKHLNVQMVAADKLAQCPPELFDVILDENQLEDACEHLADYLEAYWKATHPPSSSLPNPLLSRTLATSSLPLSPTLASNSQGSQGDQRTDRSAPIRSASQAEEEPSVEPVKKSQHRSSSSAPHHNHRSGTSRGLSRQETFDSETQESRDSAYVEPKEDYSHDHVDHYASHRDHNHRDETHGSSDHRHRESRHRSRDVDREQDHNECNKQRSRHKSKDRYCEKDGEVISKKRNEAGEWNRDVYIRQ

SEQ ID NO: 107 - protein, 442 aa, Homo sapiens
MASVVLPSGSQCAAAAAAAAPPGLRLRLLLLLFSAAALIPTGDGQNLFTKDVTVIEGEVATISCQVNKSDDSVIQLLNPNRQTIYFRDFRPLKDSRFQLLNFSSSELKVSLTNVSISDEGRYFCQLYTDPPQESYTTITVLVPPRNLMIDIQKDTAVEGEEIEVNCTAMASKPATTIRWFKGNTELKGKSEVEEWSDMYTVTSQLMLKVHKEDDGVPVICQVEHPAVTGNLQTQRYLEVQYKPQVHIQMTYPLQGLTREGDALELTCEAIGKPQPVMVTWVRVDDEMPQHAVLSGPNLFINNLNKTDNGTYRCEASNIVGKAHSDYMLYVYDPPTTIPPPTTTTTTTTTTTTTILTIITDSRAGEEGSIRAVDHAVIGGVVAVVVFAMLCLLIILGRYFARHKGTYFTHEAKGADDAADADTAIINAEGGQNNSEEKKEYFI

SEQ ID NO: 108 - protein, 437 aa, Homo sapiens
MFVLFLCNLSLVPAAASKNKVKGSQGQFPLTQNVTVVEGGTAILTCRVDQNDNTSLQWSNPAQQTLYFDDKKALRDNRIELVRASWHELSISVSDVSLSDEGQYTCSLFTMPVKTSKAYLTVLGVPEKPQISGFSSPVMEGDLMQLTCKTSGSKPAADIRWFKNDKEIKDVKYLKEEDANRKTFTVSSTLDFRVDRSDDGVAVICRVDHESLNATPQVAMQVLEIHYTPSVKIIPSTPFPQEGQPLILTCESKGKPLPEPVLWTKDGGELPDPDRMVVSGRELNILFLNKTDNGTYRCEATNTIGQSSAEYVLIVHDVPNTLLPTTIIPSLTTATVTTTVAITTSPTTSATTSSIRDPNALAGQNGPDHALIGGIVAVVVFVTLCSIFLLGRYLARHKGTYLTNEAKGAEDAPDADTAIINAEGSQVNAEEKKEYFI

SEQ ID NO: 109 - protein, 1300 aa, Homo sapiens
MLDPSSSEEESDEGLEEESRDVLVAAGSSQRAPPAPTREGRRDAPGRAGGGGAARSVSPSPSVLSEGRDEPQRQLDDEQERRIRLQLYVFVVRCIAYPFNAKQPTDMARRQQKLNKQQLQLLKERFQAFLNGETQIVADEAFCNAVRSYYEVFLKSDRVARMVQSGGCSANDFREVFKKNIEKRVRSLPEIDGLSKETVLSSWIAKYDAIYRGEEDLCKQPNRMALSAVSELILSKEQLYEMFQQILGIKKLEHQLLYNACQLDNADEQAAQIRRELDGRLQLADKMAKERKFPKFIAKDMENMYIEELRSSVNLLMANLESLPVSKGGPEFKLQKLKRSQNSAFLDIGDENEIQLSKSDVVLSFTLEIVIMEVQGLKSVAPNRIVYCTMEVEGEKLQTDQAEASRPQWGTQGDFTTTHPRPVVKVKLFTESTGVLALEDKELGRVILYPTSNSSKSAELHRMVVPKNSQDSDLKIKLAVRMDKPAHMKHSGYLYALGQKVWKRWKKRYFVLVQVSQYTFAMCSYREKKSEPQELMQLEGYTVDYTDPHPGLQGGCMFFNAVKEGDTVIFASDDEQDRILWVQAMYRATGQSYKPVPAIQTQKLNPKGGTLHADAQLSGKDADRFQKHGMDEFISANPCKLDHAFLFRILQRQTLDHRLNDSYSCLGWFSPGQVFVLDEYCARYGVRGCHRHLCYLAELMEHSENGAVIDPTLLHYSFAFCASHVHGNRPDGIGTVSVEEKERFEEIKERLSSLLENQISHFRYCFPFGRPEGALKATLSLLERVLMKDIATPIPAEEVKKVVRKCLEKAALINYTRLTEYAKIEGPAEKETETMNQASPARKLEEILHLAELCIEVLQQNEEHHAEAFAWWPDLLAEHAEKFWALFTVDMDTALEAQPQDSWDSFPLFQLLNNFLRNDTLLCNGKFHKHLQEIFVPLVVRYVDLMESSIAQSIHRGFEQETWQPVKNIANSLPNVALPKVPSLPLNLPQIPNISTASWMPSLYESTNGSATSEDLFWKLDALQMFVFDLHWPEQEFAHHLEQRLKLMASDMLEACVKRTRTAFELKLQKASKTTDLRIPASVCTMFNVLVDAKKQSTKLCALDGGQEQQYHSKIDDLIDNSVKEIISLLVSKFVSVLEGVLSKLSRYDEGTFFSSILSFTVKAAAKYVDVPKPGMDLADTYIMFVRQNQDILREKVNEEMYIEKLFDQWYSSSMKVICVWLTDRLDLQLHIYQLKTLIKIVKKTYRDFRLQGVLEGTLNSKTYDTVHRRLTVEEATASVSEGGGLQGITMKDSDEEEEG

SEQ ID NO: 110 - protein, 489 aa, Homo sapiens
MATITCTRFTEEYQLFEELGKGAFSVVRRCVKVLAGQEYAAKIINTKKLSARDHQKLEREARICRLLKHPNIVRLHDSISEEGHHYLIFDLVTGGELFEDIVAREYYSEADASHCIQQILEAVLHCHQMGVVHRDLKPENLLLASKLKGAAVKLADFGLAIEVEGEQQAWFGFAGTPGYLSPEVLRKDPYGKPVDLWACGVILYILLVGYPPFWDEDQHRLYQQIKAGAYDFPSPEWDTVTPEAKDLINKMLTINPSKRITAAEALKHPWISHRSTVASCMHRQETVDCLKKFNARRKLKGAILTTMLATRNFSGGKSGGNKKSDGVKKRKSSSSVQLMESSESTNTTIEDEDTKVRKQEIIKVTEQLIEAISNGDFESYTKMCDPGMTAFEPEALGNLVEGLDFHRFYFENLWSRNSKPVHTTILNPHIHLMGDESACIAYIRITQYLDAGGIPRTAQSEETRVWHRRDGKWQIVHFHRSGAPSVLPH

SEQ ID NO: 111 - protein, 473 aa, Homo sapiens
MLKVTVPSCSASSCSSVTASAAPGTASLVPDYWIDGSNRDALSDFFEVESELGRGATSIVYRCKQKGTQKPYALKVLKKTVDKKIVRTEIGVLLRLSHPNIIKLKEIFETPTEISLVLELVTGGELFDRIVEKGYYSERDAADAVKQILEAVAYLHENGIVHRDLKPENLLYATPAPDAPLKIADFGLSKIVEHQVLMKTVCGTPGYCAPEILRGCAYGPEVDMWSVGIITYILLCGFEPFYDERGDQFMFRRILNCEYYFISPWWDEVSLNAKDLVRKLIVLDPKKRLTTFQALQHPWVTGKAANFVHMDTAQKKLQEFNARRKLKAAVKAVVASSRLGSASSSHGSIQESHKASRDPSPIQDGNEDMKAIPEGEKIQGDGAQAAVKGAQAELMKVQALEKVKGADINAEEAPKMVPKAVEDGIKVADLELEEGLAEEKLKTVEEAAAPREGQGSSAVGFEVPQQDVILPEY

SEQ ID NO: 112 - protein, 1478 aa, Homo sapiens
MGDAADPREMRKTFIVPAIKPFDHYDFSRAKIACNLAWLVAKAFGTENVPEELQEPFYTDQYDQEHIKPPVVNLLLSAELYCRAGSLILKSDAAKPLLGHDAVIQALAQKGLYVTDQEKLVTERDLHKKPIQMSAHLAMIDTLMMAYTVEMVSIEKVIACAQQYSAFFQATDLPYDIEDAVMYWINKVNEHLKDIMEQEQKLKEHHTVEAPGGQKARYRKEQTLLKQLPCIPLVENLLKDGTDGCALAALIHFYCPDVVRLEDICLKETMSLADSLYNLQLIQEFCQEYLNQCCHFTLEDMLYAASSIKSNYLVFMAELFWWFEVVKPSFVQPRVVRPQGAEPVKDMPSIPVLNAAKRNVLDSSSDFPSSGEGATFTQSHHHLPSRYSRPQAHSSASGGIRRSSSMSYVDGFIGTWPKEKRSSVHGVSFDISFDKEDSVQRSTPNRGITRSISNEGLTLNNSHVSKHIRKNLSFKPINGEEEAESIEEELNIDSHSDLKSCVPLNTNELNSNENIHYKLPNGALQNRILLDEFGNQIETPSIEEALQIIHDTEKSPHTPQPDQIANGFFLHSQEMSILNSNIKLNQSSPDNVTDTKGALSPITDNTEVDTGIHVPSEDIPETMDEDSSLRDYTVSLDSDMDDASKFLQDYDIRTGNTREALSPCPSTVSTKSQPGSSASSSSGVKMTSFAEQKFRKLNHTDGKSSGSSSQKTTPEGSELNIPHVVAWAQIPEETGLPQGRDTTQLLASEMVHLRMKLEEKRRAIEAQKKKMEAAFTKQRQKMGRTAFLTVVKKKGDGISPLREEAAGAEDEKVYTDRAKEKESQKTDGQRSKSLADIKESMENPQAKWLKSPTTPIDPEKQWNLASPSEETLNEGEILEYTKSIEKLNSSLHFLQQEMQRLSLQQEMLMQMREQQSWVISPPQPSPQKQIRDFKPSKQAGLSSAIAPFSSDSPRPTHPSPQSSNRKSASFSVKSQRTPRPNELKITPLNRTLTPPRSVDSLPRLRRFSPSQVPIQTRSFVCFGDDGEPQLKESKPKEEVKKEELESKGTLEQRGHNPEEKEIKPFESTVSEVLSLPVTETVCLTPNEDQLNQPTEPPPKPVFPPTAPKNVNLIEVSLSDLKPPEKADVPVEKYDGESDKEQFDDDQKVCCGFFFKDDQKAENDMAMKRAALLEKRLRREKETQLRKQQLEAEMEHKKEETRRKTEEERQKKEDERARREFIRQEYMRRKQLKLMEDMDTVIKPRPQVVKQKKQRPKSIHRDHIESPKTPIKGPPVSSLSLASLNTGDNESVHSGKRTPRSESVEGFLSPSRCGSRNGEKDWENASTTSSVASGTEYTGPKLYKEPSAKSNKHIIQNALAHCCLAGKVNEGQKKKILEEMEKSDANNFLILFRDSGCQFRSLYTYCPETEEINKLTGIGPKSITKKMIEGLYKYNSDRKQFSHIPAKTLSASVDAITIHSHLWQTKRPVTPKKLLPTKA

SEQ ID NO: 113 - protein, 1673 aa, Homo sapiens
MWRAEGKWLPKTSRKSVSQSVFCGTSTYCVLNTVPPIEDDHGNSNSSHVKIFLPKKLLECLPKCSSLPKERHRWNTNEEIAAYLITFEKHEEWLTTSPKTRPQNGSMILYNRKKVKYRKDGYCWKKRKDGKTTREDHMKLKVQGVECLYGCYVHSSIIPTFHRRCYWLLQNPDIVLVHYLNVPAIEDCGKPCGPILCSINTDKKEWAKWTKEELIGQLKPMFHGIKWTCSNGNSSSGFSVEQLVQQILDSHQTKPQPRTHNCLCTGSLGAGGSVHHKCNSAKHRIISPKVEPRTGGYGSHSEVQHNDVSEGKHEHSHSKGSSREKRNGKVAKPVLLHQSSTEVSSTNQVEVPDTTQSSPVSISSGLNSDPDMVDSPVVTGVSGMAVASVMGSLSQSATVFMSEVTNEAVYTMSPTAGPNHHLLSPDASQGLVLAVSSDGHKFAFPTTGSSESLSMLPTNVSEELVLSTTLDGGRKIPETTMNFDPDCFLNNPKQGQTYGGGGLKAEMVSSNIRHSPPGERSFSFTTVLTKEIKTEDTSFEQQMAKEAYSSSAAAVAASSLTLTAGSSLLPSGGGLSPSTTLEQMDFSAIDSNKDYTSSFSQTGHSPHIHQTPSPSFFLQDASKPLPVEQNTHSSLSDSGGTFVMPTVKTEASSQTSSCSGHVETRIESTSSLHLMQFQANFQAMTAEGEVTMETSQAAEGSEVLLKSGELQACSSEHYLQPETNGVIRSAGGVPILPGNVVQGLYPVAQPSLGNASNMELSLDHFDISFSNQFSDLINDFISVEGGSSTIYGHQLVSGDSTALSQSEDGARAPFTQAEMCLPCCSPQQGSLQLSSSEGGASTMAYMHVAEVVSAASAQGTLGMLQQSGRVFMVTDYSPEWSYPEGGVKVLITGPWQEASNNYSCLFDQISVPASLIQPGVLRCYCPAHDTGLVTLQVAFNNQIISNSVVFEYKARALPTLPSSQHDWLSLDDNQFRMSILERLEQMERRMAEMTGSQQHKQASGGGSSGGGSGSGNGGSQAQCASGTGALGSCFESRVVVVCEKMMSRACWAKSKHLIHSKTFRGMTLLHLAAAQGYATLIQTLIKWRTKHADSIDLELEVDPLNVDHFSCTPLMWACALGHLEAAVVLYKWDRRAISIPDSLGRLPLGIARSRGHVKLAECLEHLQRDEQAQLGQNPRIHCPASEEPSTESWMAQWHSEAISSPEIPKGVTVIASTNPELRRPRSEPSNYYSSESHKDYPAPKKHKLNPEYFQTRQEKLLPTALSLEEPNIRKQSPSSKQSVPETLSPSEGVRDFSRELSPPTPETAAFQASGSQPVGKWNSKDLYIGVSTVQVTGNPKGTSVGKEAAPSQVRPREPMSVLMMANREVVNTELGSYRDSAENEECGQPMDDIQVNMMTLAEHIIEATPDRIKQENFVPMESSGLERTDPATISSTMSWLASYLADADCLPSAAQIRSAYNEPLTPSSNTSLSPVGSPVSEIAFEKPNLPSAADWSEFLSASTSEKVENEFAQLTLSDHEQRELYEAARLVQTAFRKYKGRPLREQQEVAAAVIQRCYRKYKQYALYKKMTQAAILIQSKFRSYYEQKKFQQSRRAAVLIQKYYRSYKKCGKRRQARRTAVIVQQKLRSSLLTKKQDQAARKIMRFLRRCRHSPLVDHRLYKRSERIEKGQGT

SEQ ID NO: 114 - protein, 719 aa, Homo sapiens
MASSSGRVTIQLVDEEAGVGAGRLQLFRGQSYEAIRAACLDSGILFRDPYFPAGPDALGYDQLGPDSEKAKGVKWMRPHEFCAEPKFICEDMSRTDVCQGSLGNCWFLAAAASLTLYPRLLRRVVPPGQDFQHGYAGVFHFQLWQFGRWMDVVVDDRLPVREGKLMFVRSEQRNEFWAPLLEKAYAKLHGSYEVMRGGHMNEAFVDFTGGVGEVLYLRQNSMGLFSALRHALAKESLVGATALSDRGEYRTEEGLVKGHAYSITGTHKVFLGFTKVRLLRLRNPWGCVEWTGAWSDSCPRWDTLPTECRDALLVKKEDGEFWMELRDFLLHFDTVQICSLSPEVLGPSPEGGGWHVHTFQGRWVRGFNSGGSQPNAETFWTNPQFRLTLLEPDEEDDEDEEGPWGGWGAAGARGPARGGRTPKCTVLLSLIQRNRRRLRAKGLTYLTVGFHVFQIPEELLGLWDSPRSHALLPRLLRADRSPLSARRDVTRRCCLRPGHYLVVPSTAHAGDEADFTLRVFSERRHTAVEIDDVISADLQSLQGPYLPLELGLEQLFQELAGEEEELNASQLQALLSIALEPARAHTSTPREIGLRTCEQLLQCFGHGQSLALHHFQQLWGYLLEWQAIFNKFDEDTSGTMNSYELRLALNAAGFHLNNQLTQTLTSRYRDSRLRVDFERFVSCVAHLTCIFCHCSQHLDGGEGVICLTHRQWMEVATFS

SEQ ID NO: 115 - protein, 709 aa, Homo sapiens
MPSATSHSGSGSKSSGPPPPSGSSGSEAAAGAGAAAPASQHPATGTGAVQTEAMKQILGVIDKKLRNLEKKKGKLDDYQERMNKGERLNQDQLDAVSKYQEVTNNLEFAKELQRSFMALSQDIQKTIKKTARREQLMREEAEQKRLKTVLELQYVLDKLGDDEVRTDLKQGLNGVPILSEEELSLLDEFYKLVDPERDMSLRLNEQYEHASIHLWDLLEGKEKPVCGTTYKVLKEIVERVFQSNYFDSTHNHQNGLCEEEEAASAPAVEDQVPEAEPEPAEEYTEQSEVESTEYVNRQFMAETQFTSGEKEQVDEWTVETVEVVNSLQQQPQAASPSVPEPHSLTPVAQADPLVRRQRVQDLMAQMQGPYNFIQDSMLDFENQTLDPAIVSAQPMNPTQNMDMPQLVCPPVHSESRLAQPNQVPVQPEATQVPLVSSTSEGYTASQPLYQPSHATEQRPQKEPIDQIQATISLNTDQTTASSSLPAASQPQVFQAGTSKPLHSSGINVNAAPFQSMQTVFNMNAPVPPVNEPETLKQQNQYQASYNQSFSSQPHQVEQTELQQEQLQTVVGTYHGSPDQSHQVTGNHQQPPQQNTGFPRSNQPYYNSRGVSRGGSRGARGLMNGYRGPANGFRGGYDGYRPSFSNTPNSGYTQSQFSAPRDYSGYQRDGYQQNFKRGSGQSGPRGAPRGRGGPPRPNRGMPQMNTQQVN

SEQ ID NO: 116 - protein, 436 aa, Homo sapiens [sequence omitted]

SEQ ID NO: 117 - protein, 921 aa, Homo sapiens
MADDDVLFEDVYELCEVIGKGPFSVVRRCINRETGQQFAVKIVDVAKFTSSPGLSTEDLKREASICHMLKHPHIVELLETYSSDGMLYMVFEFMDGADLCFEIVKRADAGFVYSEAVASHYMRQILEALRYCHDNNIIHRDVKPHCVLLASKENSAPVKLGGFGVAIQLGESGLVAGGRVGTPHFMAPEVVKREPYGKPVDVWGCGVILFILLSGCLPFYGTKERLFEGIIKGKYKMNPRQWSHISESAKDLVRRMLMLDPAERITVYEALNHPWLKERDRYAYKIHLPETVEQLRKFNARRKLKGAVLAAVSSHKFNSFYGDPPEELPDFSEDPTSSGLLAAERAVSQVLDSLEEIHALTDCSEKDLDFLHSVFQDQHLHTLLDLYDKINTKSSPQIRNPPSDAVQRAKEVLEEISCYPENNDAKELKRILTQPHFMALLQTHDVVAHEVYSDEALRVTPPPTSPYLNGDSPESANGDMDMENVTRVRLVQFQKNTDEPMGITLKMNELNHCIVARIMHGGMIHRQGTLHVGDEIREINGISVANQTVEQLQKMLREMRGSITFKIVPSYRTQSSSCERDSPSTSRQSPANGHSSTNNSVSDLPSTTQPKGRQIYVRAQFEYDPAKDDLIPCKEAGIRFRVGDIIQIISKDDHNWWQGKLENSKNGTAGLIPSPELQEWRVACIAMEKTKQEQQASCTWFGKKKKQYKDKYLAKHNADLVTYEEVVKLPAFKRKTLVLLGAHGVGRRHIKNTLITKHPDRFAYPIPHTTRPPKKDEENGKNYYFVSHDQMMQDISNNEYLEYGSHEDAMYGTKLETIRKIHEQGLIAILDVEPQALKVLRTAEFAPFVVFIAAPTITPGLNEDESLQRLQKESDILQRTYAHYFDLTIINNEIDETIRHLEEAVELVCTAPQWVPVSWVY

SEQ ID NO: 118 - protein, 551 aa, Homo sapiens
MPSETPQAEVGPTGCPHRSGPHSAKGSLEKGSPEDKEAKEPLWIRPDAPSRCTWQLGRPASESPHHHTAPAKSPKILPDILKKIGDTPMVRINKIGKKFGLKCELLAKCEFFNAGGSVKDRISLRMIEDAERDGTLKPGDTIIEPTSGNTGIGLALAAAVRGYRCIIVMPEKMSSEKVDVLRALGAEIVRTPTNARFDSPESHVGVAWRLKNEIPNSHILDQYRNASNPLAHYDTTADEILQQCDGKLDMLVASVGTGGTITGIARKLKEKCPGCRIIGVDPEGSILAEPEELNQTEQTTYEVEGIGYDFIPTVLDRTVVDKWFKSNDEEAFTFARMLIAQEGLLCGGSAGSTVAVAVKAAQELQEGQRCVVILPDSVRNYMTKFLSDRWMLQKGFLKEEDLTEKKPWWWHLRVQELGLSAPLTVLPTITCGHTIEILREKGFDQAPVVDEAGVILGMVTLGNMLSSLLAGKVQPSDQVGKVIYKQFKQIRLTDTLGRLSHILEMDHFALVVHEQIQYHSTGKSSQRQMVFGVVTAIDLLNFVAAQERDQK

SEQ ID NO: 119 - protein, 951 aa, Homo sapiens
MHKRKGPPGPPGRGAAAARQLGLLVDLSPDGLMIPEDGANDEELEAEFLALVGGQPPALEKLKGKGPLPMEAIEKMASLCMRDPDEDEEEGTDEDDLEADDDLLAELNEVLGEEQKASETPPPVAQPKPEAPHPGLETTLQERLALYQTAIESARQAGDSAKMRRYDRGLKTLENLLASIRKGNAIDEADIPPPVAIGKGPASTPTYSPAPTQPAPRIASAPEPRVTLEGPSATAPASSPGLAKPQMPPGPCSPGPLAQLQSRQRDYKLAALHAKQQGDTTAAARHFRVAKSFDAVLEALSRGEPVDLSCLPPPPDQLPPDPPSPPSQPPTPATAPSTTEVPPPPRTLLEALEQRMERYQVAAAQAKSKGDQRKARMHERIVKQYQDAIRAHKAGRAVDVAELPVPPGFPPIQGLEATKPTQQSLVGVLETAMKLANQDEGPEDEEDEVPKKQNSPVAPTAQPKAPPSRTPQSGSAPTAKAPPKATSTRAQQQLAFLEGRKKQLLQAALRAKQKNDVEGAKMHLRQAKGLEPMLEASRNGLPVDITKVPPAPVNKDDFALVQRPGPGLSQEAARRYGELTKLIRQQHEMCLNHSNQFTQLGNITETTKFEKLAEDCKRSMDILKQAFVRGLPTPTARFEQRTFSVIKIFPDLSSNDMLLFIVKGINLPTPPGLSPGDLDVFVRFDFPYPNVEEAQKDKTSVIKNTDSPEFKEQFKLCINRSHRGFRRAIQTKGIKFEVVHKGGLFKTDRVLGTAQLKLDALEIACEVREILEVLDGRRPTGGRLEVMVRIREPLTAQQLETTTERWLVIDPVPAAVPTQVAGPKGKAPPVPAPARESGNRSARPLHSLSVLAFDQERLERKILALRQARRPVPPEVAQQYQDIMQRSQWQRAQLEQGGVGIRREYAAQLERQLQFYTEAARRLGNDGSRDAAKEALYRRNLVESELQRLRR

SEQ ID NO: 120 - protein, 573 aa, Homo sapiens
MSAFCLGLVGRASAPAEPDSACCMELPAAAGDAVRSPAAAAALIFPGGSGELELALEEELALLAAGERPSDPGEHPQAEPGSLAEGAGPQPPPSQDPELLSVIRQKEKDLVLAARLGKALLERNQDMSRQYEQMHKELTDKLEHLEQEKHELRRRFENREGEWEGRVSELESDVKQLQDELERQQIHLREADREKSRAVQELSEQNQRLLDQLSRASEVERQLSMQVHALREDFREKNSSTNQHIIRLESLQAEIKMLSDRKRELEHRLSATLEENDLLQGTVEELQDRVLILERQGHDKDLQLHQSQLELQEVRLSCRQLQVKVEELTEERSLQSSAATSTSLLSEIEQSMEAEELEQEREQLRLQLWEAYCQVRYLCSHLRGNDSADSAVSTDSSMDESSETSSAKDVPAGSLRTALNELKRLIQSIVDGMEPTVTLLSVEMTALKEERDRLRVTSEDKEPKEQLQKAIRDRDEAIAKKNAVELELAKCRMDMMSLNSQLLDAIQQKLNLSQQLEAWQDDMHRVIDRQLMDTHLKERSQPAAALCRGHSAGRGDEPSIAEGKRLFSFFRKI

SEQ ID NO: 121 - protein, 2028 aa, Homo sapiens
MDVTVSELLELFLQSPLVTWVKTFGPFGSGSQDNLTMYMDLVDGIFLNQIMLQIDPRPTNQRINKHVNNDVNLRIQNLTILVRNIKTYYQEVLQQLIVMNLPNVLMIGRDPLSGKSMEEIKKVLLLVLGCAVQCERKEEFIERIKQLDIETQAGIVAHIQEVTHNQENVFDLQWLELPDVAPEELEALSRSMVLHLRRLIDQRDECTELIVDLTQERDYLQAQHPPSPIKSSSADSTPSPTSSLSSEDKQHLAVELADTKARLRRVRQELEDKTEQLVDTRHEVDQLVLELQKVKQENIQLAADARSARAYRDELDSLREKANRVERLELELTRCKEKLHDVDFYKARMEELREDNIILIETKAMLEEQLTAARARGDKVHELEKENLQLKSKLHDLELDRDTDKKRIEELLEENMVLEIAQKQSMNESAHLGWELEQLSKNADLSDASRKSFVFELNECASSRILKLEKENQSLQSTIQGLRDASLVLEESGLKCGELEKENHQLSKKIEKLQTQLEREKQSNQDLETLSEELIREKEQLQSDMETLKADKARQIKDLEQEKDHLNRAMWSLRERSQVSSEARMKDVEKENKALHQTVTEANGKLSQLEFEKRQLHRDLEQAKEKGERAEKLERELQRLQEENGRLARKVTSLETATEKVEALEHESQGLQLENRTLRKSLDTLQNVSLQLEGLERDNKQLDAENLELRRLVETMRFTSTKLAQMERENQQLEREKEELRKNVDLLKALGKKSERLELSYQSVSAENLRLQQSLESSSHKTQTLESELGELEAERQALRRDLEALRLANAQLEGAEKDRKALEQEVAQLEKDKKLLEKEAKRLWQQVELKDAVLDDSTAKLSAVEKESRALDKELARCRDAAGKLKELEKDNRDLTKQVTVHARTLTTLREDLVLEKLKSQQLSSELDKLSQELEKVGLNRELLLQEDDSGSDTKYKILEGRNESALKTTLAMKEEKIVLLEAQMEEKASLNRQLESELQMLKKECETLRQNQGEGQHLQNSFKHPAGKTAASHQGKEAWGPGHKEATMELLRVKDRAIELERNNAALQAEKQLLKEQLQHLETQNVTFSSQILTLQKQSAFLQEHNTTLQTQTAKLQVENSTLSSQSAALTAQYTLLQNHHTAKETENESLQRQQEQLTAAYEALLQDHEHLGTLHERQSAEYEALIRQHSCLKTLHRNLELEHKELGERHGDMLKRKAELEEREKVLTTEREALQQEQRTNALAMGENQRLRGELDRVNFLHHQLKGEYEELHAHTKELKTSLNNAQLELNRWQARFDELKEQHQTMDISLTKLDNHCELLSRLKGNLEEENHHLLSQIQLLSQQNQMLLEQNMENKEQYHEEQKQYIDKLNALRRHKEKLEEKIMDQYKFYDPPPKKKNHWIGAKALVKLIKPKKEGSRERLKSTVDSPPWQLESSDPASPAASQPLRSQAENPDTPALGSNCAEERDAHNGSVGKGPGDLKPKRGSPHRGSLDRTDASTDLAMRSWPSELGSRTCSTSATTTAPSNSTPIARHPGRTKGYNSDDNLCEPSLEFEVPNHRQYVSRPSSLESSRNTSSNSSPLNLKGSSEQLHGRSESFSSEDLIPSRDLATLPREASTPGRNALGRHEYPLPRNGPLPQEGAQKRGTAPPYVGVRPCSASPSSEMVTLEEFLEESNRSSPTHDTPSCRDDLLSDYFRKASDPPAIGGQPGPPAKKEGAKMPTNFVAPTVKMAAPTSEGRPLKPGQYVKPNFRLTEAEAPPSVAPRQAQPPQSLSLGRPRQAPVPPASHAPASRSASLSRAFSLASADLLRASGPEACKQESPQKLGAPEALGGRETGSHTLQSPAPPSSHSLARERTPLVGKAGSSCQGPGPRSRPLDTRRFSLAPPKEERLAPLHQSATAPAIATAGAGAAAAGSGSNSQLLHFSPAAAPAARTKPKAPPRSGEVATITPVRAGLSLSEGDGVPGQGCSEGLPAKSPGRSPDLAPHLGRALEDCSRGSVSKSSPASPEPGGDPQTVWYEYGCV

SEQ ID NO: 122 - protein, 441 aa, Homo sapiens
MDDDDFGGFEAAETFDGGSGETQTTSPAIPWAAFPAVSGVHLSPSSPEIVLDRDHSSSIGCLSSDAIISSPENTHAANSIVSQTIPKAQIQQSTHTHLDISLFPLGLTDEKSNGTIALVDDSEDPGANVSNIQLQQKISSLEIKLKVSEEEKQRIKQDVESLMEKHNVLEKGFLKEKEQEAISFQDRYKELQEKHKQELEDMRKAGHEALSIIVDEYKALLQSSVKQQVEAIEKQYISAIEKQAHKCEELLNAQHQRLLEMLDTEKELLKEKIKEALIQQSQEQKEILEKCLEEERQRNKEALVSAAKLEKEAVKDAVLKVVEEERKNLEKAHAEERELWKTEHAKDQEKVSQEIQKAIQEQRKISQETVKAAIIEEQKRSEKAVEEAVKRTRDELIEYIKEQKRLDQVIRQRSLSSLELFLSCAQKQLSALIATEPVDIE

SEQ ID NO: 123 - protein, 539 aa, Homo sapiens
MPENVAPRSGATAGAAGGRGKGAYQDRDKPAQIRFSNISAAKAVADAIRTSLGPKGMDKMIQDGKGDVTITNDGATILKQMQVLHPAARMLVELSKAQDIEAGDGTTSVVIIAGSLLDSCTKLLQKGIHPTIISESFQKALEKGIEILTDMSRPVELSDRETLLNSATTSLNSKVVSQYSSLLSPMSVNAVMKVIDPATATSVDLRDIKIVKKLGGTIDDCELVEGLVLTQKVSNSGITRVEKAKIGLIQFCLSAPKTDMDNQIVVSDYAQMDRVLREERAYILNLVKQIKKTGCNVLLIQKSILRDALSDLALHFLNKMKIMVIKDIEREDIEFICKTIGTKPVAHIDQFTADMLGSAELAEEVNLNGSGKLLKITGCASPGKTVTIVVRGSNKLVIEEAERSIHDALCVIRCLVKKRALIAGGGAPEIELALRLTEYSRTLSGMESYCVRAFADAMEVIPSTLAENAGLNPISTVTELRNRHAQGEKTAGINVRKGGISNILEELVVQPLLVSVSALTLATETVRSILKIDDVVNTR

SEQ ID NO: 124 - protein, 300 aa, Homo sapiens
MANCEFSPVSGDKPCCRLSRRAQLCLGVSILVLILVVVLAVVVPRWRQQWSGPGTTKRFPETVLARCVKYTEIHPEMRHVDCQSVWDAFKGAFISKHPCNITEEDYQPLMKLGTQTVPCNKILLWSRIKDLAHQFTQVQRDMFTLEDTLLGYLADDLTWCGEFNTSKINYQSCPDWRKDCSNNPVSVFWKTVSRRFAEAACDVVHVMLNGSRSKIFDKNSTFGSVEVHNLQPEKVQTLEAWVIHGGREDSRDLCQDPTIKELESIISKRNIQFSCKNIYRPDKFLQCVKNPEDSSCTSEI

SEQ ID NO: 125 - protein, 742 aa, Homo sapiens
MDKFWWHAAWGLCLVPLSLAQIDLNITCRFAGVFHVEKNGRYSISRTEAADLCKAFNSTLPTMAQMEKALSIGFETCRYGFIEGHVVIPRIHPNSICAANNTGVYILTSNTSQYDTYCFNASAPPEEDCTSVTDLPNAFDGPITITIVNRDGTRYVQKGEYRTNPEDIYPSNPTDDDVSSGSSSERSSTSGGYIFYTFSTVHPIPDEDSPWITDSTDRIPATTLMSTSATATETATKRQETWDWFSWLFLPSESKNHLHTTTQMAGTSSNTISAGWEPNEENEDERDRHLSFSGSGIDDDEDFISSTISTTPRAFDHTKQNQDWTQWNPSHSNPEVLLQTTTRMTDVDRNGTTAYEGNWNPEAHPPLIHHEHHEEEETPHSTSTIQATPSSTTEETATQKEQWFGNRWHEGYRQTPKEDSHSTTGTAAASAHTSHPMQGRTTPSPEDSSWTDFFNPISHPMGRGHQAGRRMDMDSSHSITLQPTANPNTGLVEDLDRTGPLSMTTQQSNSQSFSTSHEGLEEDKDHPTTSTLTSSNRNDVTGGRRDPNHSEGSTTLLEGYTSHYPHTKESRTFIPVTSAKTGSFGVTAVTVGDSNSNVNRSLSGDQDTFHPSGGSHTTHGSESDGHSHGSQEGGANTTSGPIRTPQIPEWLIILASLLALALILAVCIAVNSRRRCGQKKKLVINSGNGAVEDRKPSGLNGEASKSQEMVHLVNKESSETPDQFMTADETRNLQNVDMKIGV

SEQ ID NO: 126 - protein, 272 aa, Homo sapiens
MVAWRSAFLVCLAFSLATLVQRGSGDFDDFNLEDAVKETSSVKQPWDHTTTTTTNRPGTTRAPAKPPGPTEGSGLDLADALDDQDDGRRKPGIGGRERWNHVTTTTKRPVTTRAPANTLGNDFDLADALDDRNDRDDGRRKPIAGGGGFSDKDLEDIVGGGEYKPDKGKGDGRYGSNDDPGSGMVAEPGTIAGVASALAMALIGAVSSYISYQQKKFCFSIQHAAAGQEGLNADYVKGENLEAVVCEEPQVKYSTLHTQSAEPPPPPEPARI

SEQ ID NO: 127 - protein, 1711 aa, Homo sapiens
MSAKVRLKKLEQLLLDGPWRNESALSVETLLDVLVCLYTECSHSALRRDKYVAEFLEWAKPFTQLVKEMQLHREDFEIIKVIGRGAFGEVAVVKMKNTERIYAMKILNKWEMLKRAETACFREERDVLVNGDCQWITALHYAFQDENHLYLVMDYYVGGDLLTLLSKFEDKLPEDMARFYIGEMVLAIDSIHQLHYVHRDIKPDNVLLDVNGHIRLADFGSCLKMNDDGTVQSSVAVGTPDYISPEILQAMEDGMGKYGPECDWWSLGVCMYEMLYGETPFYAESLVETYGKIMNHEERFQFPSHVTDVSEEAKDLIQRLICSRERRLGQNGIEDFKKHAFFEGLNWENIRNLEAPYIPDVSSPSDTSNFDVDDDVLRNTEILPPGSHTGFSGLHLPFIGFTFTTESCFSDRGSLKSIMQSNTLTKDEDVQRDLEHSLQMEAYERRIRRLEQEKLELSRKLQESTQTVQSLHGSSRALSNSNRDKEIKKLNEEIERLKNKIADSNRLERQLEDTVALRQEREDSTQRLRGLEKQHRVVRQEKEELHKQLVEASERLKSQAKELKDAHQQRKLALQEFSELNERMAELRAQKQKVSRQLRDKEEEMEVATQKVDAMRQEMRRAEKLRKELEAQLDDAVAEASKERKLREHSENFCKQMESELEALKVKQGGRGAGATLEHQQEISKIKSELEKKVLFYEEELVRREASHVLEVKNVKKEVHDSESHQLALQKEILMLKDKLEKSKRERHNEMEEAVGTIKDKYERERAMLFDENKKLTAENEKLCSFVDKLTAQNRQLEDELQDLAAKKESVAHWEAQIAEIIQWVSDEKDARGYLQALASKMTEELEALRSSSLGSRTLDPLWKVRRSQKLDMSARLELQSALEAEIRAKQLVQEELRKVKDANLTLESKLKDSEAKNRELLEEMEILKKKMEEKFRADTGLKLPDFQDSIFEYFNTAPLAHDLTFRTSSASEQETQAPKPEASPSMSVAASEQQEDMARPPQRPSAVPLPTTQALALAGPKPKAHQFSIKSFSSPTQCSHCTSLMVGLIRQGYACEVCSFACHVSCKDGAPQVCPIPPEQSKRPLGVDVQRGIGTAYKGHVKVPKPTGVKKGWQRAYAVVCDCKLFLYDLPEGKSTQPGVIASQVLDLRDDEFSVSSVLASDVIHATRRDIPCIFRVTASLLGAPSKTSSLLILTENENEKRKWVGILEGLQSILHKNRLRNQVVHVPLEAYDSSLPLIKAILTAAIVDADRIAVGLEEGLYVIEVTRDVIVRAADCKKVHQIELAPREKIVILLCGRNHHVHLYPWSSLDGAEGSFDIKLPETKGCQLMATATLKRNSGTCLFVAVKRLILCYEIQRTKPFHRKFNEIVAPGSVQCLAVLRDRLCVGYPSGFCLLSIQGDGQPLNLVNPNDPSLAFLSQQSFDALCAVELESEEYLLCFSHMGLYVDPQGRRARAQELMWPAAPVACSCSPTHVTVYSEYGVDVFDVRTMEWVQTIGLRRIRPLNSEGTLNLLNCEPPRLIYFKSKFSGAVLNVPDTSDNSKKQMLRTRSKRRFVFKVPEEERLQQRREMLRDPELRSKMISNPTNFNHVAHMGPGDGMQVLMDLPLSAVPPSQEERPGPAPTNLARQPPSRNKPYISWPSSGGSEPSVTVPLRSMSDPDQDFDKEPDSDSTKHSTPSNSSNPSGPPSPNSPHRSQLPLEGLEQPACDT

SEQ ID NO: 128 - protein, 788 aa, Homo sapiens
MTIHQFLLLFLFWVCLPHFCSPEIMFRRTPVPQQRILSSRVPRSDGKILHRQKRGWMWNQFFLLEEYTGSDYQYVGKLHSDQDKGDGSLKYILSGDGAGTLFIIDEKTGDIHATRRIDREEKAFYTLRAQAINRRTLRPVEPESEFVIKIHDINDNEPTFPEEIYTASVPEMSVVGTSVVQVTATDADDPSYGNSARVIYSILQGQPYFSVEPETGIIRTALPNMNRENREQYQVVIQAKDMGGQMGGLSGTTTVNITLTDVNDNPPRFPQNTIHLRVLESSPVGTAIGSVKATDADTGKNAEVEYRIIDGDGTDMFDIVTEKDTQEGIITVKKPLDYESRRLYTLKVEAENTHVDPRFYYLGPFKDTTIVKISIEDVDEPPVFSRSSYLFEVHEDIEVGTIIGTVMARDPDSISSPIRFSLDRHTDLDRIFNIHSGNGSLYTSKPLDRELSQWHNLTVIAAEINNPKETTRVAVFVRILDVNDNAPQFAVFYDTFVCENARPGQLIQTISAVDKDDPLGGQKFFFSLAAVNPNFTVQDNEDNTARILTRKNGFNRHEISTYLLPVVISDNDYPIQSSTGTLTIRVCACDSQGNMQSCSAEALLLPAGLSTGALIAILLCIIILLVIVVLFAALKRQRKKEPLILSKEDIRDNIVSYNDEGGGEEDTQAFDIGTLRNPAAIEEKKLRRDIIPETLFIPRRTPTAPDNTDVRDFINERLKEHDLDPTAPPYDSLATYAYEGNDSIAESLSSLESGTTEGDQNYDYLREWGPRFNKLAEMYGGGESDKDS

SEQ ID NO: 129 - protein, 796 aa, Homo sapiens
MKENYCLQAALVCLGMLCHSHAFAPERRGHLRPSFHGHHEKGKEGQVLQRSKRGWVWNQFFVIEEYTGPDPVLVGRLHSDIDSGDGNIKYILSGEGAGTIFVIDDKSGNIHATKTLDREERAQYTLMAQAVDRDTNRPLEPPSEFIVKVQDINDNPPEFLHETYHANVPERSNVGTSVIQVTASDADDPTYGNSAKLVYSILEGQPYFSVEAQTGIIRTALPNMDREAKEEYHVVIQAKDMGGHMGGLSGTTKVTITLTDVNDNPPKFPQSVYQMSVSEAAVPGEEVGRVKAKDPDIGENGLVTYNIVDGDGMESFEITTDYETQEGVIKLKKPVDFETKRAYSLKVEAANVHIDPKFISNGPFKDTVTVKISVEDADEPPMFLAPSYIHEVQENAAAGTVVGRVHAKDPDAANSPIRYSIDRHTDLDRFFTINPEDGFIKTTKPLDREETAWLNITVFAAEIHNRHQEAKVPVAIRVLDVNDNAPKFAAPYEGFICESDQTKPLSNQPIVTISADDKDDTANGPRFIFSLPPEIIHNPNFTVRDNRDNTAGVYARRGGFSRQKQDLYLLPIVISDGGIPPMSSTNTLTIKVCGCDVNGALLSCNAEAYILNAGLSTGALIAILACIVILLVIVVLFVTLRRQKKEPLIVFEEEDVRENIITYDDEGGGEEDTEAFDIATLQNPDGINGFIPRKDIKPEYQYMPRPGLRPAPNSVDVDDFINTRIQEADNDPTAPPYDSIQIYGYEGRGSVAGSLSSLESATTDSDLDYDYLQNWGPRFKKLADLYGSKDTFDDDS

SEQ ID NO: 130 - protein, 828 aa, Homo sapiens
MRPRPEGRGLRAGVALSPALLLLLLLPPPPTLLGRLWAAGTPSPSAPGARQDGALGAGRVKRGWVWNQFFVVEEYTGTEPLYVGKIHSDSDEGDGAIKYTISGEGAGTIFLIDELTGDIHAMERLDREQKTFYTLRAQARDRATNRLLEPESEFIIKVQDINDSEPRFLHGPYIGSVAELSPTGTSVMQVMASDADDPTYGSSARLVYSVLDGEHHFTVDPKTGVIRTAVPDLDRESQERYEVVIQATDMAGQLGGLSGSTTVTIVVTDVNDNPPRFPQKMYQFSIQESAPIGTAVGRVKAEDSDVGENTDMTYHLKDESSSGGDVFKVTTDSDTQEAIIVVQKRLDFESQPVHTVILEALNKFVDPRFADLGTFRDQAIVRVAVTDVDEPPEFRPPSGLLEVQEDAQVGSLVGVVTARDPDAANRPVRYAIDRESDLDQIFDIDADTGAIVTGKGLDRETAGWHNITVLAMEADNHAQLSRASLRIRILDVNDNPPELATPYEAAVCEDAKPGQLIQTISVVDRDEPQGGHRFYFRLVPEAPSNPHFSLLDIQDNTAAVHTQHVGFNRQEQDVFFLPILVVDSGPPTLSSTGTLTIRICGCDSSGTIQSCNTTAFVMAASLSPGALIALLVCVLILVVLVLLILTLRRHHKSHLSSDEDEDMRDNVIKYNDEGGGEQDTEAYDMSALRSLYDFGELKGGDGGGSAGGGAGGGSGGGAGSPPQAHLPSERHSLPQGPPSPEPDFSVFRDFISRKVALADGDLSVPPYDAFQTYAFEGADSPAASLSSLHSGSSGSEQDFAYLSSWGPRFRPLAALYAGHRGDDEAQAS

SEQ ID NO: 131 - protein, 799 aa, Homo sapiens
MPERLAEMLLDLWTPLIILWITLPPCIYMAPMNQSQVLMSGSPLELNSLGEEQRILNRSKRGWVWNQMFVLEEFSGPEPILVGRLHTDLDPGSKKIKYILSGDGAGTIFQINDVTGDIHAIKRLDREEKAEYTLTAQAVDWETSKPLEPPSEFIIKVQDINDNAPEFLNGPYHATVPEMSILGTSVTNVTATDADDPVYGNSAKLVYSILEGQPYFSIEPETAIIKTALPNMDREAKEEYLVVIQAKDMGGHSGGLSGTTTLTVTLTDVNDNPPKFAQSLYHFSVPEDVVLGTAIGRVKANDQDIGENAQSSYDIIDGDGTALFEITSDAQAQDGIIRLRKPLDFETKKSYTLKVEAANVHIDPRFSGRGPFKDTATVKIVVEDADEPPVFSSPTYLLEVHENAALNSVIGQVTARDPDITSSPIRFSIDRHTDLERQFNINADDGKITLATPLDRELSVWHNITIIATEIRNHSQISRVPVAIKVLDVNDNAPEFASEYEAFLCENGKPGQVIQTVSAMDKDDPKNGHYFLYSLLPEMVNNPNFTIKKNEDNSLSILAKHNGFNRQKQEVYLLPIIISDSGNPPLSSTSTLTIRVCGCSNDGVVQSCNVEAYVLPIGLSMGALIAILACIILLLVIVVLFVTLRRHKNEPLIIKDDEDVRENIIRYDDEGGGEEDTEAFDIATLQNPDGINGFLPRKDIKPDLQFMPRQGLAPVPNGVDVDEFINVRLHEADNDPTAPPYDSIQIYGYEGRGSVAGSLSSLESTTSDSDQNFDYLSDWGPRFKRLGELYSVGESDKET

SEQ ID NO: 132 - protein, 789 aa, Homo sapiens
MRTYHYIPLFIWTYMFHTVDTILLQEKPNSYLSSKKIAGLTKDDGKMLRRTKRGWMWNQFFLLEEYTGTDTQYVGKLHTDQDKGDGNLKYILTGDGAGSLFVIDENTGDIHAAKKLDREEKSLYILRAKAIDRKTGRQVEPESEFIIKIHDINDNEPKFTKDLYTASVPEMSGVGTSVIQVTATDADDANYGNSAKVVYSILQGQPYFSVDPESGIIKTALPDMSRENREQYQVVIQAKDMGGQMGGLSGTTTVNITLTDVNNNPPRFPQSTYQFNSPESVPLGTHLGRIKANDPDVGENAEMEYSIAEGDGADMFDVITDKDTQEGIITVKQNLDFENQMLYTLRVDASNTHPDPRFLHLGPFKDTAVVKISVEDIDEPPVFTKVSYLIEVDEDVKEGSIIGQVTAYDPDARNNLIKYSVDRHTDMDRIFGIHSENGSIFTLKALDRESSPWHNITVTATEINNPKQSSHIPVFIRILDINDHAPEFAMYYETFVCENAKPGQLIQTVSVMDKDDPPRGHKFFFEPVPEFTLNPNFTIVDNKDNTAGIMTRKDGYSRNKMSTYLLPILIFDNDYPIQSSTGTLTIRVCACDNQGNMQSCTAEALILSAGLSTGALVAILLCVLILLILVVLFAALKRQRKKEPLIISKDDVRDNIVTYNDEGGGEEDTQAFDIGTLRNPEAREDSKLRRDVMPETIFQIRRTVPLWENIDVQDFIHRRLKENDADPSAPPYDSLATYAYEGNDSIADSLSSLESLTADCNQDYDYLSDWGPRFKKLADMYGGDDSDRD

SEQ ID NO: 133 - protein, 1030 aa, Homo sapiens
MKIPNIGNVMNKFEILGVVGEGAYGVVLKCRHKETHEIVAIKKFKDSEENEEVKETTLRELKMLRTLKQENIVELKEAFRRRGKLYLVFEYVEKNMLELLEEMPNGVPPEKVKSYIYQLIKAIHWCHKNDIVHRDIKPENLLISHNDVLKLCDFGFARNLSEGNNANYTEYVATRWYRSPELLLGAPYGKSVDMWSVGCILGELSDGQPLFPGESEIDQLFTIQKVLGPLPSEQMKLFYSNPRFHGLRFPAVNHPQSLERRYLGILNSVLLDLMKNLLKLDPADRYLTEQCLNHPTFQTQRLLDRSPSRSAKRKPYHVESSTLSNRNQAGKSTALQSHHRSNSKDIQNLSVGLPRADEGLPANESFLNGNLAGASLSPLHTKTYQASSQPGSTSKDLTNNNIPHLLSPKEAKSKTEFDFNIDPKPSEGPGTKYLKSNSRSQQNRHSFMESSQSKAGTLQPNEKQSRHSYIDTIPQSSRSPSYRTKAKSHGALSDSKSVSNLSEARAQIAEPSTSRYFPSSCLDLNSPTSPTPTRHSDTRTLLSPSGRNNRNEGTLDSRRTTTRHSKTMEELKLPEHMDSSHSHSLSAPHESFSYGLGYTSPFSSQQRPHRHSMYVTRDKVRAKGLDGSLSIGQGMAARANSLQLLSPQPGEQLPPEMTVARSSVKETSREGTSSFHTRQKSEGGVYHDPHSDDGTAPKENRHLYNDPVPRRVGSFYRVPSPRPDNSFHENNVSTRVSSLPSESSSGTNHSKRQPAFDPWKSPENISHSEQLKEKEKQGFFRSMKKKKKKSQTVPNSDSPDLLTLQKSIHSASTPSSRPKEWRPEKISDLQTQSQPLKSLRKLLHLSSASNHPASSDPRFQPLTAQQTKNSFSEIRIHPLSQASGGSSNIRQEPAPKGRPALQLPDGGCDGRRQRHHSGPQDRRFMLRTTEQQGEYFCCGDPKKPHTPCVPNRALHRPISSPAPYPVLQVRGTSMCPTLQVRGTDAFSCPTQQSGFSFFVRHVMREALIHRAQVNQAALLTYHENAALTGK

SEQ ID NO: 134 - protein, 198 aa, Homo sapiens
MSNVRVSNGSPSLERMDARQAEHPKPSACRNLFGPVDHEELTRDLEKHCRDMEEASQRKWNFDFQNHKPLEGKYEWQEVEKGSLPEFYYRPPRPPKGACKVPAQESQDVSGSRPAAPLIGAPANSEDTHLVDPKTDPSDSQTGLAEQCAGIRKRPATDDSSTQNKRANRTEENVSDGSPNAGSVEQTPKKPGLRRRQT

SEQ ID NO: 135 - protein, 1484 aa, Homo sapiens
MCPEEGGAAGLGELRSWWEVPAIAHFCSLFRTAFRLPDFEIEELEAALHRDDVEFISDLIACLLQGCYQRRDITPQTFHSYLEDIINYRWELEEGKPNPLREASFQDLPLRTRVEILHRLCDYRLDADDVFDLLKGLDADSLRVEPLGEDNSGALYWYFYGTRMYKEDPVQGKSNGELSLSRESEGQKNVSSIPGKTGKRRGRPPKRKKLQEEILLSEKQEENSLASEPQTRHGSQGPGQGTWWLLCQTEEEWRQVTESFRERTSLRERQLYKLLSEDFLPEICNMIAQKGKRPQRTKAELHPRWMSDHLSIKPVKQEETPVLTRIEKQKRKEEEEERQILLAVQKKEQEQMLKEERKRELEEKVKAVEGMCSVRVVWRGACLSTSRPVDRAKRRKLREERAWLLAQGKELPPELSHLDPNSPMREEKKTKDLFELDDDFTAMYKVLDVVKAHKDSWPFLEPVDESYAPNYYQIIKAPMDISSMEKKLNGGLYCTKEEFVNDMKTMFRNCRKYNGESSEYTKMSDNLERCFHRAMMKHFPGEDGDTDEEFWIREDEKREKRRSRAGRSGGSHVWTRSRDPEGSSRKQQPMENGGKSLPPTRRAPSSGDDQSSSSTQPPREVGTSNGRGFSHPLHCGGTPSQAPFLNQMRPAVPGTFGPLRGSDPATLYGSSGVPEPHPGEPVQQRQPFTMQPPVGINSLRGPRLGTPEEKQMCGGLTHLSNMGPHPGSLQLGQISGPSQDGSMYAPAQFQPGFIPPRHGGAPARPPDFPESSEIPPSHMYRSYKYLNRVHSAVWNGNHGATNQGPLGPDEKPHLGPGPSHQPRTLGHVMDSRVMRPPVPPNQWTEQSGFLPHGVPSSGYMRPPCKSAGHRLQPPPVPAPSSLFGAPAQALRGVQGGDSMMDSPEMIAMQQLSSRVCPPGVPYHPHQPAHPRLPGPFPQVAHPMSVTVSAPKPALGNPGRAPENSEAQEPENDQAEPLPGLEEKPPGVGTSEGVYLTQLPHPTPPLQTDCTRQSSPQERETVGPELKSSSSESADNCKAMKGKNPWPSDSSYPGPAAQGCVRDLSTVADRGALSENGVIGEASPCGSEGKGLGSSGSEKLLCPRGRTLQETMPCTGQNAATPPSTDPGLTGGTVSQFPPLYMPGLEYPNSAAHYHISPGLQGVGPVMGGKSPASHPQHFPPRGFQSNHPHSGGFPRYRPPQGMRYSYHPPPQPSYHHYQRTPYYACPQSFSDWQRPLHPQGSPSGPPASQPPPPRSLFSDKNAMASLQGCETLNAALTSPTRMDAVAAKVPNDGQNPGPEEEKLDESMERPESPKEFLDLDNHNAATKRQSSLSASEYLYGTPPPLSSGMGFGSSAFPPHSVMLQTGPPYTPQRPASHFQPRAYSSPVAALPPHHPGATQPNGLSQEGPIYRCQEEGLGHFQAVMMEQIGTRSGIRGPFQEMYRPSGMQMHPVQSQASFPKTPTAATSQEEVPPHKPPTLPLDQS

SEQ ID NO: 136 - protein, 486 aa, Homo sapiens
MYIKMATLANGQADNASLSTNGLGSSPGSAGHMNGLSHSPGNPSTIPMKDHDAIKLFIGQIPRNLDEKDLKPLFEEFGKIYELTVLKDRFTGMHKGCAFLTYCERESALKAQSALHEQKTLPGMNRPIQVKPADSESRGGSSCLRQPPSQDRKLFVGMLNKQQSEDDVRRLFEAFGNIEECTILRGPDGNSKGCAFVKYSSHAEAQAAINALHGSQTMPGASSSLVVKFADTDKERTMRRMQQMAGQMGMFNPMAIPFGAYGAYAQALMQQQAALMASVAQGGYLNPMAAFAAAQMQQMAALNMNGLAAAPMTPTSGGSTPPGITAPAVPSIPSPIGVNGFTGLPPQANGQPAAEAVFANGIHPYPAQSPTAADPLQQAYAGVQQYAGPAAYPAAYGQISQAFPQPPPMIPQQQREGPEGCNLFIYHLPQEFGDAELMQMFLPFGFVSFDNPASAQTAIQAMNGFQIGMKRLKVQLKRPKDANRPY

SEQ ID NO: 137 - protein, 481 aa, Homo sapiens
MAAAPGGSAQPAGPGPRLGFSTADSGVGMSGLNPGPAVPMKDHDAIKLFVGQIPRGLDEQDLKPLFEEFGRIYELTVLKDRLTGLHKGCAFLTYCARDSALKAQSALHEQKTLPGMNRPIQVKPAASEGRGEDRKLFVGMLGKQQGEEDVRRLFQPFGHIEECTVLRSPDGTSKGCAFVKFGSQGEAQAAIRGLHGSRTMAGASSSLVVKLADTDRERALRRMQQMAGHLGAFHPAPLPLGACGAYTTAILQHQAALLAAAQGPGLGPVAAVAAQMQHVAAFSLVAAPLLPAAAANSPPGSGPGTLPGLPAPIGVNGFGPLTPQTNGQPGSDTLYNNGLSPYPAQSPGVADPLQQAYAGMHHYAAAYPSAYAPVSTAFPQQPSALPQQQREGPEGCNLFIYHLPQEFGDAELIQTFLPFGAVVSAKVFVDRATNQSKCFGFVSFDNPTSAQTAIQAMNGFQIGMKRLKVQLKRPKDANRPY

SEQ ID NO: 138 - protein, 2479 aa, Homo sapiens
MPPNINWKEIMKVDPDDLPRQEELADNLLISLSKVEVNELKSEKQENVIHLFRITQSLMKMKAQEVELALEEVEKAGEEQAKFENQLKTKVMKLENELEMAQQSAGGRDTRFLRNEICQLEKQLEQKDRELEDMEKELEKEKKVNEQLALRNEEAENENSKLRRENKRLKKKNEQLCQDIIDYQKQIDSQKETLLSRRGEDSDYRSQLSKKNYELIQYLDEIQTLTEANEKIEVQNQEMRKNLEESVQEMEKMTDEYNRMKAIVHQTDNVIDQLKKENDHYQLQVQELTDLLKSKNEEDDPIMVAVNAKVEEWKLILSSKDDEIIEYQQMLHNLREKLKNAQLDADKSNVMALQQGIQERDSQIKMLTEQVEQYTKEMEKNTCIIEDLKNELQRNKGASTLSQQTHMKIQSTLDILKEKTKEAERTAELAEADAREKDKELVEALKRLKDYESGVYGLEDAVVEIKNCKNQIKIRDREIEILTKEINKLELKISDFLDENEALRERVGLEPKTMIDLTEFRNSKHLKQQQYRAENQILLKEIESLEEERLDLKKKIRQMAQERGKRSATSGLTTEDLNLTENISQGDRISERKLDLLSLKNMSEAQSKNEFLSRELIEKERDLERSRTVIAKFQNKLKELVEENKQLEEGMKEILQAIKEMQKDPDVKGGETSLIIPSLERLVNAIESKNAEGIFDASLHLKAQVDQLTGRNEELRQELRESRKEAINYSQQLAKANLKIDHLEKETSLLRQSEGSNVVFKGIDLPDGIAPSSASIINSQNEYLIHLLQELENKEKKLKNLEDSLEDYNRKFAVIRHQQSLLYKEYLSEKETWKTESKTIKEEKRKLEDQVQQDAIKVKEYNNLLNALQMDSDEMKKILAENSRKITVLQVNEKSLIRQYTTLVELERQLRKENEKQKNELLSMEAEVCEKIGCLQRFKEMAIFKIAALQKVVDNSVSLSELELANKQYNELTAKYRDILQKDNMLVQRTSNLEHLECENISLKEQVESINKELEITKEKLHTIEQAWEQETKLGNESSMDKAKKSITNSDIVSISKKITMLEMKELNERQRAEHCQKMYEHLRTSLKQMEERNFELETKFAELTKINLDAQKVEQMLRDELADSVSKAVSDADRQRILELEKNEMELKVEVSKLREISDIARRQVEILNAQQQSRDKEVESLRMQLLDYQAQSDEKSLIAKLHQHNVSLQLSEATALGKLESITSKLQKMEAYNLRLEQKLDEKEQALYYARLEGRNRAKHLRQTIQSLRRQFSGALPLAQQEKFSKTMIQLQNDKLKIMQEMKNSQQEHRNMENKTLEMELKLKGLEELISTLKDTKGAQKVINWHMKIEELRLQELKLNRELVKDKEEIKYLNNIISEYERTISSLEEEIVQQNKFHEERQMAWDQREVDLERQLDIFDRQQNEILNAAQKFEEATGSIPDPSLPLPNQLEIALRKIKENIRIILETRATCKSLEEKLKEKESALRLAEQNILSRDKVINELRLRLPATAEREKLIAELGRKEMEPKSHHTLKIAHQTIANMQARLNQKEEVLKKYQRLLEKAREEQREIVKKHEEDLHILHHRLELQADSSLNKFKQTAWDLMKQSPTPVPTNKHFIRLAEMEQTVAEQDDSLSSLLVKLKKVSQDLERQREITELKVKEFENIKLQLQENHEDEVKKVKAEVEDLKYLLDQSQKESQCLKSELQAQKEANSRAPTTTMRNLVERLKSQLALKEKQQKALSRALLELRAEMTAAAEERIISATSQKEAHLNVQQIVDRHTRELKTQVEDLNENLLKLKEALKTSKNRENSLTDNLNDLNNELQKKQKAYNKILREKEEIDQENDELKRQIKRLTSGLQGKPLTDNKQSLIEELQRKVKKLENQLEGKVEEVDLKPMKEKNAKEELIRWEEGKKWQAKIEGIRNKLKEKEGEVFTLTKQLNTLKDLFAKADKEKLTLQRKLKTTGMTVDQVLGIRALESEKELEELKKRNLDLENDILYMRAHQALPRDSVVEDLHLQNRYLQEKLHALEKQFSKDTYSKPSISGIESDDHCQREQELQKENLKLSSENIELKFQLEQANKDLPRLKNQVRDLKEMCEFLKKEKAEVQRKLGHVRGSGRSGKTIPELEKTIGLMKKVVEKVQRENEQLKKASGILTSEKMANIEQENEKLKAELEKLKAHLGHQLSMHYESKTKGTEKIIAENERLRKELKKETDAAEKLRIAKNNLEILNEKMTVQLEETGKRLQFAESRGPQLEGADSKSWKSIVVTRMYETKLKELETDIAKKNQSITDLKQLVKEATEREQKVNKYNEDLEQQIKILKHVPEGAETEQGLKRELQVLRLANHQLDKEKAELIHQIEANKDQSGAESTIPDADQLKEKIKDLETQLKMSDLEKQHLKEEIKKLKKELENFDPSFFEEIEDLKYNYKEEVKKNILLEEKVKKLSEQLGVELTSPVAASEEFEDEEESPVNFPIY

SEQ ID NO: 139 - protein, 373 aa, Homo sapiens
MSLRRHIGNPEYLMKRIPQNPRYQHIKSRLDTGNSMTKYTEKLEEIKKNYRYKKDELFKRLKVTTFAQLIIQVASLSDQTLEVTAEEIQRLEDNDSAASDPDAETTARTNGKGNPGEQSPSPEQFINNAGAGDSSRSTLQSVISGVGELDLDKGPVKKAEPHTKDKPYPDCPFLLLDVRDRDSYQQCHIVGAYSYPIATLSRTMNPYSNDILEYKNAHGKIIILYDDDERLASQAATTMCERGFENLFMLSGGLKVLAQKFPEGLITGSLPASCQQALPPGSARKRSSPKGPPLPAENKWRFTPEDLKKIEYYLEEEQGPADHPSRLNQANSSGRESKVPGARSAQNLPGGGPASHSNPRSLSSGHLQGKPWK

SEQ ID NO: 140 - protein, 1302 aa, Homo sapiens
MELYFGEYQHVQQEYGVHLRLASDDTQKSRSSQNSKAGSYGVSIRVQGIDGHPYIVLNNTERCLAGTSFSENGPPFPPPVINNLPLHSSNGSVPKENSEELQLPENPYAQPSPIRNLKQPLLHEGKNGVLDRKDGSVKPSHLLNFQRHPELLQPYDPEKNELNLQNHQPSESNWLKTLTEEGINNKKPWTCFPKPSNSQPTSPSLEDPAKSGVTAIRLCSSVVIEDPKKQTSVCVNVQSCTKERVGEEALFTSGRPLTAHSPHAHPETKKTRPDVLPFRRQDSAGPVLDGARSRRSSSSSTTPTSANSLYRFLLDDQECAIHADNVNRHENRRYIPFLPGTGRDIDTGSIPGVDQLIEKFDQKPGLQRRGRSGKRNRINTDDRKRSRSVDSAFPFGLQGNSEYLIEFSRNLGKSSEHLLRPSQVCPQRPLSQERRGKQSVGRTFAKLQGAAHGASCAHSRPPQPNIDGKVLETEGSQESTVIRAPSLGAQSKKEEEVKTATATLMLQNRATATSPDSGAKKISVKTFPSASNTQATPDLLKGQQELTQQTNEETAKQILYNYLKEGSTDNDDATKRKVNLVFEKIQTLKSRAAGSAQGNNQACNSTSEVKDLLEQKSKLTIEVAELQRQLQLEVKNQQNIKEERERMRANLEELRSQHNEKVEENSTLQQRLEESEGELRKNLEELFQVKMEREQHQTEIRDLQDQLSEMHDELDSAKRSEDREKGALIEELLQAKQDLQDLLIAKEEQEDLLRKRERELTALKGALKEEVSSHDQEMDKLKEQYDAELQALRESVEEATKNVEVLASRSNTSEQDQAGTEMRVKLLQEENEKLQGRSEELERRVAQLQRQIEDLKGDEAKAKETLKKYEGEIRQLEEALVHARKEEKEAVSARRALENELEAAQGNLSQTTQEQKQLSEKLKEESEQKEQLRRLKNEMENERWHLGKTIEKLQKEMADIVEASRTSTLELQNQLDEYKEKNRRELAEMQRQLKEKTLEAEKSRLTAMKMQDEMRLMEEELRDYQRAQDEALTKRQLLEQTLKDLEYELEAKSHLKDDRSRLVKQMEDKVSQLEMELEEERNNSDLLSERISRSREQMEQLRNELLQERAARQDLECDKISLERQNKDLKSRIIHLEGSYRSSKEGLVVQMEARIAELEDRLESEERDRANLQLSNRRLERKVKELVMQVDDEHLSLTDQKDQLSLRLKAMKRQVEEAEEEIDRLESSKKKLQRELEEQMDMNEHLQGQLNSMKKDLRLKKLPSKVLDDMDDDDDLSTDGGSLYEAPVSYTFSKDSTVASQI

SEQ ID NO: 141 - protein, 1828 aa, Homo sapiens
MMRNKDKSQEEDSSLHSNASSHSASEEASGSDSGSQSESEQGSDPGSGHGSESNSSSESSESQSESESESAGSKSQPVLPEAKEKPASKKERIADVKKMWEEYPDVYGVRRSNRSRQEPSRFNIKEEASSGSESGSPKRRGQRQLKKQEKWKQEPSEDEQEQGTSAESEPEQKKVKARRPVPRRTVPKPRVKKQPKTQRGKRKKQDSSDEDDDDDEAPKRQTRRRAAKNVSYKEDDDFETDSDDLIEMTGEGVDEQQDNSETIEKVLDSRLGKKGATGASTTVYAIEANGDPSGDFDTEKDEGEIQYLIKWKGWSYIHSTWESEESLQQQKVKGLKKLENFKKKEDEIKQWLGKVSPEDVEYFNCQQELASELNKQYQIVERVIAVKTSKSTLGQTDFPAHSRKPAPSNEPEYLCKWMGLPYSECSWEDEALIGKKFQNCIDSFHSRNNSKTIPTRECKALKQRPRFVALKKQPAYLGGENLELRDYQLEGLNWLAHSWCKNNSVILADEMGLGKTIQTISFLSYLFHQHQLYGPFLIVVPLSTLTSWQREFEIWAPEINVVVYIGDLMSRNTIREYEWIHSQTKRLKFNALITTYEILLKDKTVLGSINWAFLGVDEAHRLKNDDSLLYKTLIDFKSNHRLLITGTPLQNSLKELWSLLHFIMPEKFEFWEDFEEDHGKGRENGYQSLHKVLEPFLLRRVKKDVEKSLPAKVEQILRVEMSALQKQYYKWILTRNYKALAKGTRGSTSGFLNIVMELKKCCNHCYLIKPPEENERENGQEILLSLIRSSGKLILLDKLLTRLRERGNRVLIFSQMVRMLDILAEYLTIKHYPFQRLDGSIKGEIRKQALDHFNADGSEDFCFLLSTRAGGLGINLASADTVVIFDSDWNPQNDLQAQARAHRIGQKKQVNIYRLVTKGTVEEEIIERAKKKMVLDHLVIQRMDTTGRTILENNSGRSNSNPFNKEELTAILKFGAEDLFKELEGEESEPQEMDIDEILRLAETRENEVSTSATDELLSQFKVANFATMEDEEELEERPHKDWDEIIPEEQRKKVEEEERQKELEEIYMLPRIRSSTKKAQTNDSDSDTESKRQAQRSSASESETEDSDDDKKPKRRGRPRSVRKDLVEGFTDAEIRRFIKAYKKFGLPLERLECIARDAELVDKSVADLKRLGELIHNSCVSAMQEYEEQLKENASEGKGPGKRRGPTIKISGVQVNVKSIIQHEEEFEMLHKSIPVDPEEKKKYCLTCRVKAAHFDVEWGVEDDSRLLLGIYEHGYGNWELIKTDPELKLTDKILPVETDKKPQGKQLQTRADYLLKLLRKGLEKKGAVTGGEEAKLKKRKPRVKKENKVPRLKEEHGIELSSPRHSDNPSEEGEVKDDGLEKSPMKKKQKKKENKENKEKQMSSRKDKEGDKERKKSKDKKEKPKSGDAKSSSKSKRSQGPVHITAGSEPVPIGEDEDDDLDQETFSICKERMRPVKKALKQLDKPDKGLNVQEQLEHTRNCLLKIGDRIAECLKAYSDQEHIKLWRRNLWIFVSKFTEFDARKLHKLYKMAHKKRSQEEEEQKKKDDVTGGKKPFRPEASGSSRDSLISQSHTSHNLHPQKPHLPASHGPQMHGHPRDNYNHPNKRHFSNADRGDWQRERKFNYGGGNNNPPWGSDRHHQYEQHWYKDHHYGDRRHMDAHRSGSYRPNNMSRKRPYDQYSSDRDHRGHRDYYDRHHHDSKRRRSDEFRPQNYHQQDFRRMSDHRPAMGYHGQGPSDHYRSFHTDKLGEYKQPLPPLHPAVSDPRSPPSQKSPHDSKSPLDHRSPLERSLEQKNNPDYNWNVRKT

SEQ ID NO: 142 - protein, 2997 aa, Homo sapiens
MADPGMMSLFGEDGNIFSEGLEGLGECGYPENPVNPMGQQMPIDQGFASLQPSLHHPSTNQNQTKLTHFDHYNQYEQQKMHLMDQPNRMMSNTPGNGLASPHSQYHTPPVPQVPHGGSGGGQMGVYPGMQNERHGQSFVDSSSMWGPRAVQVPDQIRAPYQQQQPQPQPPQPAPSGPPAQGHPQHMQQMGSYMARGDFSMQQHGQPQQRMSQFSQGQEGLNQGNPFIATSGPGHLSHVPQQSPSMAPSLRHSVQQFHHHPSTALHGESVAHSPRFSPNPPQQGAVRPQTLNFSSRSQTVPSPTINNSGQYSRYPYSNLNQGLVNNTGMNQNLGLTNNTPMNQSVPRYPNAVGFPSNSGQGLMHQQPIHPSGSLNQMNTQTMHPSQPQGTYASPPPMSPMKAMSNPAGTPPPQVRPGSAGIPMEVGSYPNMPHPQPSHQPPGAMGIGQRNMGPRNMQQSRPFIGMSSAPRELTGHMRPNGCPGVGLGDPQAIQERLIPGQQHPGQQPSFQQLPTCPPLQPHPGLHHQSSPPHPHHQPWAQLHPSPQNTPQKVPVHQHSPSEPFLEKPVPDMTQVSGPNAQLVKSDDYLPSIEQQPQQKKKKKKNNHIVAEDPSKGFGKDDFPGGVDNQELNRNSLDGSQEEKKKKKRSKAKKDPKEPKEPKEKKEPKEPKTPKAPKIPKEPKEKKAKTATPKPKSSKKSSNKKPDSEASALKKKVNKGKTEGSENSDLDKTPPPSPPPEEDEDPGVQKRRSSRQVKRKRYTEDLEFKISDEEADDADAAGRDSPSNTSQSEQQESVDAEGPVVEKIMSSRSVKKQKESGEEVEIEEFYVKYKNFSYLHCQWASIEDLEKDKRIQQKIKRFKAKQGQNKFLSEIEDELFNPDYVEVDRIMDFARSTDDRGEPVTHYLVKWCSLPYEDSTWERRQDIDQAKIEEFEKLMSREPETERVERPPADDWKKSESSREYKNNNKLREYQLEGVNWLLFNWYNMRNCILADEMGLGKTIQSITFLYEIYLKGIHGPFLVIAPLSTIPNWEREFRTWTELNVVVYHGSQASRRTIQLYEMYFKDPQGRVIKGSYKFHAIITTFEMILTDCPELRNIPWRCVVIDEAHRLKNRNCKLLEGLKMMDLEHKVLLTGTPLQNTVEELFSLLHFLEPSRFPSETTFMQEFGDLKTEEQVQKLQAILKPMMLRRLKEDVEKNLAPKEETIIEVELTNIQKKYYRAILEKNFTFLSKGGGQANVPNLLNTMMELRKCCNHPYLINGAEEKILEEFKETHNAESPDFQLQAMIQAAGKLVLIDKLLPKLKAGGHRVLIFSQMVRCLDILEDYLIQRRYPYERIDGRVRGNLRQAAIDRFSKPDSDRFVFLLCTRAGGLGINLTAADTCIIFDSDWNPQNDLQAQARCHRIGQSKSVKIYRLITRNSYEREMFDKASLKLGLDKAVLQSMSGRENATNGVQQLSKKEIEDLLRKGAYGALMDEEDEGSKFCEEDIDQILLRRTHTITIESEGKGSTFAKASFVASGNRTDISLDDPNFWQKWAKKAELDIDALNGRNNLVIDTPRVRKQTRLYSAVKEDELMEFSDLESDSEEKPCAKPRRPQDKSQGYARSECFRVEKNLLVYGWGRWTDILSHGRYKRQLTEQDVETICRTILVYCLNHYKGDENIKSFIWDLITPTADGQTRALVNHSGLSAPVPRGRKGKKVKAQSTQPVVQDADWLASCNPDALFQEDSYKKHLKHHCNKVLLRVRMLYYLRQEVIGDQADKILEGADSSEADVWIPEPFHAEVPADWWDKEADKSLLIGVFKHGYEKYNSMRADPALCFLERVGMPDAKAIAAEQRGTDMLADGGDGGEFDREDEDPEYKPTRTPFKDEIDEFANSPSEDKEESMEIHATGKHSESNAELGQLYWPNTSTLTTRLRRLITAYQRSYKRQQMRQEALMKTDRRRRRPREEVRALEAEREAIISEKRQKWTRREEADFYRVVSTFGVIFDPVKQQFDWNQFRAFARLDKKSDESLEKYFSCFVAMCRRVCRMPVKPDDEPPDLSSIIEPITEERASRTLYRIELLRKIREQVLHHPQLGERLKLCQPSLDLPEWWECGRHDRDLLVGAAKHGVSRTDYHILNDPELSFLDAHKNFAQNRGAGNTSSLNPLAVGFVQTPPVISSAHIQDERVLEQAEGKVEEPENPAAKEKCEGKEEEEETDGSGKESKQECEAEASSVKNELKGVEVGADTGSKSISEKGSEEDEEEKLEDDDKSEESSQPEAGAVSRGKNFDEESNASMSTARDETRDGFYMEDGDPSVAQLLHERTFAFSFWPKDRVMINRLDNICEAVLKGKWPVNRRQMFDFQGLIPGYTPTTVDSPLQKRSFAELSMVGQASISGSEDITTSPQLSKEDALNLSVPRQRRRRRRKIEIEAERAAKRRNLMEMVAQLRESQVVSENGQEKVVDLSKASREATSSTSNFSSLSSKFILPNVSTPVSDAFKTQMELLQAGLSRTPTRHLLNGSLVDGEPPMKRRRGRRKNVEGLDLLFMSHKRTSLSAEDAEVTKAFEEDIETPPTRNIPSPGQLDPDTRIPVINLEDGTRLVGEDAPKNKDLVEWLKLHPTYTVDMPSYVPKNADVLFSSFQKPKQKRHRCRNPNKLDINTLTGEERVPVVNKRNGKKMGGAMAPPMKDLPRWLEENPEFAVAPDWTDIVKQSGFVPESMFDRLLTGPVVRGEGASRRGRRPKSEIARAAAAAAAVASTSGINPLLVNSLFAGMDLTSLQNLQNLQSLQLAGLMGFPPGLATAATAGGDAKNPAAVLPLMLPGMAGLPNVFGLGGLLNNPLSAATGNTTTASSQGEPEDSTSKGEEKGNENEDENKDSEKSTDAVSAADSANGSVGAATAPAGLPSNPLAFNPFLLSTMAPGLFYPSMFLPPGLGGLTLPGFPALAGLQNAVGSSEEKAADKAEGGPFKDGETLEGSDAEESLDKTAESSLLEDEIAQGEELDSLDGGDEIENNENDE

SEQ ID NO: 143 - protein, 2581 aa, Homo sapiens
MADPIMDLFDDPNLFGLDSLTDDSFNQVTQDPIEEALGLPSSLDSLDQMNQDGGGGDVGNSSASELVPPPEETAPTELSKESTAPAPESITLHDYTTQPASQEQPAQPVLQTSTPTSGLLQVSKSQEILSQGNPFMGVSATAVSSSSAGGQPPQSAPKIVILKAPPSSSVTGAHVAQIQAQGITSTAQPLVAGTANGGKVTFTKVLTGTPLRPGVSIVSGNTVLAAKVPGNQAAVQRIVQPSRPVKQLVLQPVKGSAPAGNPGATGPPLKPAVTLTSTPTQGESKRITLVLQQPQSGGPQGHRHVVLGSLPGKIVLQGNQLAALTQAKNAQGQPAKVVTIQLQVQQPQQKIQIVPQPPSSQPQPQQPPSTQPVTLSSVQQAQIMGPGQSPGQRLSVPVKVVLQPQAGSSQGASSGLSVVKVLSASEVAALSSPASSAPHSGGKTGMEENRRLEHQKKQEKANRIVAEAIARARARGEQNIPRVLNEDELPSVRPEEEGEKKRRKKSAGERLKEEKPKKSKTSGASKTKGKSKLNTITPVVGKKRKRNTSSDNSDVEVMPAQSPREDEESSIQKRRSNRQVKRKKYTEDLDIKITDDEEEEEVDVTGPIKPEPILPEPVQEPDGETLPSMQFFVENPSEEDAAIVDKVLSMRIVKKELPSGQYTEAEEFFVKYKNYSYLHCEWATISQLEKDKRIHQKLKRFKTKMAQMRHFFHEDEEPFNPDYVEVDRILDESHSIDKDNGEPVIYYLVKWCSLPYEDSTWELKEDVDEGKIREFKRIQSRHPELKRVNRPQASAWKKLELSHEYKNRNQLREYQLEGVNWLLFNWYNRQNCILADEMGLGKTIQSIAFLQEVYNVGIHGPFLVIAPLSTITNWEREFNTWTEMNTIVYHGSLASRQMIQQYEMYCKDSRGRLIPGAYKFDALITTFEMILSDCPELREIEWRCVIIDEAHRLKNRNCKLLDSLKHMDLEHKVLLTGTPLQNTVEELFSLLHFLEPSQFPSESEFLKDFGDLKTEEQVQKLQAILKPMMLRRLKEDVEKNLAPKQETIIEVELTNIQKKYYRAILEKNFSFLSKGAGHTNMPNLLNTMMELRKCCNHPYLINGAEEKILTEFREACHIIPHDFHLQAMVRSAGKLVLIDKLLPKLKAGGHKVLIFSQMVRCLDILEDYLIQRRYLYERIDGRVRGNLRQAAIDRFSKPDSDRFVFLLCTRAGGLGINLTAADTCIIFDSDWNPQNDLQAQARCHRIGQSKAVKVYRLITRNSYEREMFDKASLKLGLDKAVLQSMSGRDGNITGIQQFSKKEIEDLLRKGAYAAIMEEDDEGSKFCEEDIDQILLRRTTTITIESEGKGSTFAKASFVASENRTDISLDDPNFWQKWAKKADLDMDLLNSKNNLVIDTPRVRKQTRHFSTLKDDDLVEFSDLESEDDERPRSRRHDRHHAYGRTDCFRVEKHLLVYGWGRWRDILSHGRFKRRMTERDVETICRAILVYCLLHYRGDENIKGFIWDLISPAENGKTKELQNHSGLSIPVPRGRKGKKVKSQSTFDIHKADWIRKYNPDTLFQDESYKKHLKHQCNKVLLRVRMLYYLRQEVIGDQAEKVLGGAIASEIDIWFPVVDQLEVPTTWWDSEADKSLLIGVFKHGYEKYNTMRADPALCFLEKAGRPDDKAIAAEHRVLDNFSDIVEGVDFDKDCEDPEYKPLQGPPKDQDDEGDPLMMMDEEISVIDGDEAQVTQQPGHLFWPPGSALTARLRRLVTAYQRSYKREQMKIEAAERGDRRRRRCEAAFKLKEIARREKQQRWTRREQTDFYRVVSTFGVEYDPDTMQFHWDRFRTFARLDKKTDESLTKYFHGFVAMCRQVCRLPPAAGDEPPDPNLFIEPITEERASRTLYRIELLRRLREQVLCHPLLEDRLALCQPPGPELPKWWEPVRHDGELLRGAARHGVSQTDCNIMQDPDFSFLAARMNYMQNHQAGAPAPSLSRCSTPLLHQQYTSRTASPLPLRPDAPVEKSPEETATQVPSLESLTLKLEHEVVARSRPTPQDYEMRVSPSDTTPLVSRSVPPVKLEDEDDSDSELDLSKLSPSSSSSSSSSSSSSSTDESEDEKEEKLTDQSRSKLYDEESLLSLTMSQDGFPNEDGEQMTPELLLLQERQRASEWPKDRVLINRIDLVCQAVLSGKWPSSRRSQEMVTGGILGPGNHLLDSPSLTPGEYGDSPVPTPRSSSAASMAEEEASAVSTAAAQFTKLRRGMDEKEFTVQIKDEEGLKLTFQKHKLMANGVMGDGHPLFHKKKGNRKKLVELEVECMEEPNHLDVDLETRIPVINKVDGTLLVGEDAPRRAELEMWLQGHPEFAVDPRFLAYMEDRRKQKWQRCKKNNKAELNCLGMEPVQTANSRNGKKGHHTETVFNRVLPGPIAPESSKKRARRMRPDLSKMMALMQGGSTGSLSLHNTFQHSSSGLQSVSSLGHSSATSASLPFMPFVMGGAPSSPHVDSSTMLHHHHHHPHPHHHHHHHPGLRAPGYPSSPVTTASGTTLRLPPLQPEEDDDEDEEDDDDLSQGYDSSERDFSLIDDPMMPANSDSSEDADD

SEQ ID NO: 144 - protein, 395 aa, Homo sapiens
MAAEATAVAGSGAVGGCLAKDGLQQSKCPDTTPKRRRASSLSRDAERRAYQWCREYLGGAWRRVQPEELRVYPVSGGLSNLLFRCSLPDHLPSVGEEPREVLLRLYGAILQGVDSLVLESVMFAILAERSLGPQLYGVFPEGRLEQYIPSRPLKTQELREPVLSAAIATKMAQFHGMEMPFTKEPHWLFGTMERYLKQIQDLPPTGLPEMNLLEMYSLKDEMGNLRKLLESTPSPVVFCHNDIQEGNILLLSEPENADSLMLVDFEYSSYNYRGFDIGNHFCEWVYDYTHEEWPFYKARPTDYPTQEQQLHFIRHYLAEAKKGETLSQEEQRKLEEDLLVEVSRYALASHFFWGLWSILQASMSTIEFGYLDYAQSRFQFYFQQKGQLTSVHSSS

SEQ ID NO: 145 - protein, 590 aa, Homo sapiens
MTLHNNSTTSPLFPNISSSWIHSPSDAGLPPGTVTHFGSYNVSRAAGNFSSPDGTTDDPLGGHTVWQVVFIAFLTGILALVTIIGNILVIVSFKVNKQLKTVNNYFLLSLACADLIIGVISMNLFTTYIIMNRWALGNLACDLWLAIDYVASNASVMNLLVISFDRYFSITRPLTYRAKRTTKRAGVMIGLAWVISFVLWAPAILFWQYFVGKRTVPPGECFIQFLSEPTITFGTAIAAFYMPVTIMTILYWRIYKETEKRTKELAGLQASGTEAETENFVHPTGSSRSCSSYELQQQSMKRSNRRKYGRCHFWFTTKSWKPSSEQMDQDHSSSDSWNNNDAAASLENSASSDEEDIGSETRAIYSIVLKLPGHSTILNSTKLPSSDNLQVPEEELGMVDLERKADKLQAQKSVDDGGSFPKSFSKLPIQLESAVDTAKTSDVNSSVGKSTATLPLSFKEATLAKRFALKTRSQITKRKRMSLVKEKKAAQTLSAILLAFIITWTPYNIMVLVNTFCDSCIPKTFWNLGYWLCYINSTVNPVCYALCNKTFRTTFKMLLLCQCDKKKRRKQQYQQRQSVIFHKRAPEQAL

SEQ ID NO: 146 - protein, 531 aa, Homo sapiens
MRCSPGGVWLALAASLLHGKATASPPSTPPWDPGHIPGASVRPAPGPVSLQGEFQRKLYKELVKNYNPLERPVANDSQPLTVYFSLSLLQIMDVDEKNQVLTTNIWLQMSWTDHYLQWNVSEYPGVKTVRFPDGQIWKPDILLYNSADERFDATFHTNVLVNSSGHCQYLPPGIFKSSCYIDVRWFPFDVQHCKLKFGSWSYGGWSLDLQMQEADISGYIPNGEWDLVGIPGKRSERFYECCKEPYPDVTFTVTMRRRTLYYGLNLLIPCVLISALALLVFLLPADSGEKISLGITVLLSLTVFMLLVAEIMPATSDSVPLIAQYFASTMIIVGLSVVVTVIVLQYHHHDPDGGKMPKWTRVILLNWCAWFLRMKRPGEDKVRPACQHKQRRCSLASVEMSAVAPPPASNGNLLYIGFRGLDGVHCVPTPDSGVVCGRMACSPTHDEHLLHGGQPPEGDPDLAKILEEVRYIANRFRCQDESEAVCSEWKFAACVVDRLCLMAFSVFTIICTIGILMSAPNFVEAVSKDFA

SEQ ID NO: 147 - protein, 458 aa, Homo sapiens
MLPDFMLVLIVLGIPSSATTGFNSIAENEDALLRHLFQGYQKWVRPVLHSNDTIKVYFGLKISQLVDVDEKNQLMTTNVWLKQEWTDHKLRWNPDDYGGIHSIKVPSESLWLPDIVLFENADGRFEGSLMTKVIVKSNGTVVWTPPASYKSSCTMDVTFFPFDRQNCSMKFGSWTYDGTMVDLILINENVDRKDFFDNGEWEILNAKGMKGNRRDGVYSYPFITYSFVLRRLPLFYTLFLIIPCLGLSFLTVLVFYLPSDEGEKLSLSTSVLVSLTVFLLVIEEIIPSSSKVIPLIGEYLLFIMIFVTLSIIVTVFVINVHHRSSSTYHPMAPWVKRLFLQKLPKLLCMKDHVDRYSSPEKEESQPVVKGKVLEKKKQKQLSDGEKVLVAFLEKAADSIRYISRHVKKEHFISQVVQDWKFVAQVLDRIFLWLFLIVSVTGSVLIFTPALKMWLHSYH

SEQ ID NO: 148 - protein, 411 aa, Homo sapiens
MGMRARVPKVAHSTRRPPAARMWLPRFSSKTVTVLLLAQTTCLLLFIISRPGPSSPAGGEDRVHVLVLSSWRSGSSFLGQLFSQHPDVFYLMEPAWHVWTTLSQGSAATLHMAVRDLMRSIFLCDMDVFDAYMPQSRNLSAFFNWATSRALCSPPACSAFPRGTISKQDVCKTLCTRQPFSLAREACRSYSHVVLKEVRFFNLQVLYPLLSDPALNLRIVHLVRDPRAVLRSREAAGPILARDNGIVLGTNGKWVEADPHLRLIREVCRSHVRIAEAATLKPPPFLRGRYRLVRFEDLAREPLAEIRALYAFTGLTLTPQLEAWIHNITHGSGIGKPIEAFHTSSRNARNVSQAWRHALPFTKILRVQEVCAGALQLLGYRPVYSADQQRDLTLDLVLPRGPDHFSWASPD

SEQ ID NO: 149 - protein, 187 aa, Homo sapiens
MGNKQTIFTEEQLDNYQDCTFFNKKDILKLHSRFYELAPNLVPMDYRKSPIVHVPMSLIIQMPELRENPFKERIVAAFSEDGEGNLTFNDFVDMFSVLCESAPRELKANYAFKIYDFNTDNFICKEDLELTLARLTKSELDEEEVVLVCDKVIEEADLDGDGKLGFADFEDMIAKAPDFLSTFHIRI

SEQ ID NO: 150 - protein, 286 aa, Homo sapiens
MNPASDGGTSESIFDLDYASWGIRSTLMVAGFVFYLGVFVVCHQLSSSLNATYRSLVAREKVFWDLAATRAVFGVQSTAAGLWALLGDPVLHADKARGQQNWCWFHITTATGFFCFENVAVHLSNLIFRTFDLFLVIHHLFAFLGFLGCLVNLQAGHYLAMTTLLLEMSTPFTCVSWMLLKAGWSESLFWKLNQWLMIHMFHCRMVLTYHMWWVCFWHWDGLVSSLYLPHLTLFLVGLALLTLIINPYWTHKKTQQLLNPVDWNFAQPEAKSRPEGNGQLLRKKRP

SEQ ID NO: 151 - skipped

SEQ ID NO: 152 - protein, 956 aa, Homo sapiens
MTLLLLPLLLASLLASCSCNKANKHKPWIEAEYQGIVMENDNTVLLNPPLFALDKDAPLRYAGEICGFRLHGSGVPFEAVILDKATGEGLIRAKEPVDCEAQKEHTFTIQAYDCGEGPDGANTKKSHKATVHVRVNDVNEFAPVFVERLYRAAVTEGKLYDRILRVEAIDGDCSPQYSQICYYEILTPNTPFLIDNDGNIENTEKLQYSGERLYKFTVTAYDCGKKRAADDAEVEIQVKPTCKPSWQGWNKRIEYAPGAGSLALFPGIRLETCDEPLWNIQATIELQTSHVAKGCDRDNYSERALRKLCGAATGEVDLLPMPGPNANWTAGLSVHYSQDSSLIYWFNGTQAVQVPLGGPSGLGSGPQDSLSDHFTLSFWMKHGVTPNKGKKEEETIVCNTVQNEDGFSHYSLTVHGCRIAFLYWPLLESARPVKFLWKLEQVCDDEWHHYALNLEFPTVTLYTDGISFDPALIHDNGLIHPPRREPALMIGACWTEEKNKEKEKGDNSTDTTQGDPLSIHHYFHGYLAGFSVRSGRLESREVIECLYACREGLDYRDFESLGKGMKVHVNPSQSLLTLEGDDVETFNHALQHVAYMNTLRFATPGVRPLRLTTAVKCFSEESCVSIPEVEGYVVVLQPDAPQILLSGTAHFARPAVDFEGTNGVPLFPDLQITCSISHQVEAKKDESWQGTVTDTRMSDEIVHNLDGCEISLVGDDLDPERESLLLDTTSLQQRGLELTNTSAYLTIAGVESITVYEEILRQARYRLRHGAALYTRKFRLSCSEMNGRYSSNEFIVEVNVLHSMNRVAHPSHVLSSQQFLHRGHQPPPEMAGHSLASSHRNSMIPSAATLIIVVCVGFLVLMVVLGLVRIHSLHRRVSGAGGPPGASSDPKDPDLFWDDSALTIIVNPMESYQNRQSCVTGAVGGQQEDEDSSDSEVADSPSSDERRIIETPPHRY

SEQ ID NO: 153 - protein, 1640 aa, Homo sapiens
MAQILPVRFQEHFQLQNLGINPANIGFSTLTMESDKFICIREKVGEQAQVTIIDMSDPMAPIRRPISAESAIMNPASKVIALKAGKTLQIFNIEMKSKMKAHTMAEEVIFWKWVSVNTVALVTETAVYHWSMEGDSQPMKMFDRHTSLVGCQVIHYRTDEYQKWLLLVGISAQQNRVVGAMQLYSVDRKVSQPIEGHAAAFAEFKMEGNAKPATLFCFAVRNPTGGKLHIIEVGQPAAGNQPFVKKAVDVFFPPEAQNDFPVAMQIGAKHGVIYLITKYGYLHLYDLESGVCICMNRISADTIFVTAPHKPTSGIIGVNKKGQVLSVCVEEDNIVNYATNVLQNPDLGLRLAVRSNLAGAEKLFVRKFNTLFAQGSYAEAAKVAASAPKGILRTRETVQKFQSIPAQSGQASPLLQYFGILLDQGQLNKLESLELCHLVLQQGRKQLLEKWLKEDKLECSEELGDLVKTTDPMLALSVYLRANVPSKVIQCFAETGQFQKIVLYAKKVGYTPDWIFLLRGVMKISPEQGLQFSRMLVQDEEPLANISQIVDIFMENSLIQQCTSFLLDALKNNRPAEGLLQTWLLEMNLVHAPQVADAILGNKMFTHYDRAHIAQLCEKAGLLQQALEHYTDLYDIKRAVVHTHLLNPEWLVNFFGSLSVEDSVECLHAMLSANIRQNLQLCVQVASKYHEQLGTQALVELFESFKSYKGLFYFLGSIVNFSQDPDVHLKYIQAACKTGQIKEVERICRESSCYNPERVKNFLKEAKLTDQLPLIIVCDRFGFVHDLVLYLYRNNLQRYIEIYVQKVNPSRTPAVIGGLLDVDCSEEVIKHLIMAVRGQFSTDELVAEVEKRNRLKLLLPWLESQIQEGCEEPATHNALAKIYIDSNNSPECFLRENAYYDSSVVGRYCEKRDPHLACVAYERGQCDLELIKVCNENSLFKSEARYLVCRKDPELWAHVLEETNPSRRQLIDQVVQTALSETRDPEEISVTVKAFMTADLPNELIELLEKIVLDNSVFSEHRNLQNLLILTAIKADRTRVMEYISRLDNYDALDIASIAVSSALYEEAFTVFHKFDMNASAIQVLIEHIGNLDRAYEFAERCNEPAVWSQLAQAQLQKDLVKEAINSYIRGDDPSSYLEVVQSASRSNNWEDLVKFLQMARKKGRESYIETELIFALAKTSRVSELEDFINGPNNAHIQQVGDRCYEEGMYEAAKLLYSNVSNFARLASTLVHLGEYQAAVDNSRKASSTRTWKEVCFACMDGQEFRFAQLCGLHIVIHADELEELMCYYQDRGYFEELILLLEAALGLERAHMGMFTELAILYSKFKPQKMLEHLELFWSRVNIPKVLRAAEQAHLWAELVFLYDKYEEYDNAVLTMMSHPTEAWKEGQFKDIITKVANVELCYRALQFYLDYKPLLINDLLLVLSPRLDHTWTVSFFSKAGQLPLVKPYLRSVQSHNNKSVNEALNHLLTEEEDYQGLRASIDAYDNFDNISLAQQLEKHQLMEFRCIAAYLYKGNNWWAQSVELCKKDHLYKDAMQHAAESRDAELAQKLLQWFLEEGKRECFAACLFTCYDLLRPDMVLELAWRHNLVDLAMPYFIQVMREYLSKVDKLDALESLRKQEEHVTEPAPLVFDFDGHE

SEQ ID NO: 154 - protein, 773 aa, Homo sapiens
MDVTSSSGGGGDPRQIEETKPLLGGDVSAPEGTKMGAVPCRRALLLCNGMRYKLLQEGDIQVCVIRHPRTFLSKILTSKFLRRWEPHHLTLADNSLASATPTGYMENSVSYSAIEDVQLLSWENAPKYCLQLTIPGGTVLLQAANSYLRDQWFHSLQWKKKIYKYKKVLSNPSRWEVVLKEIRTLVDMALTSPLQDDSINQAPLEIVSKLLSENTNLTTQEHENIIVAIAPLLENNHPPPDLCEFFCKHCRERPRSMVVIEVFTPVVQRILKHNMDFGKCPRLRLFTQEYILALNELNAGMEVVKKFIQSMHGPTGHCPHPRVLPNLVAVCLAAIYSCYEEFINSRDNSPSLKEIRNGCQQPCDRKPTLPLRLLHPSPDLVSQEATLSEARLKSVVVASSEIHVEVERTSTAKPALTASAGNDSEPNLIDCLMVSPACSTMSIELGPQADRTLGCYVEILKLLSDYDDWRPSLASLLQPIPFPKEALAHEKFTKELKYVIQRFAEDPRQEVHSCLLSVRAGKDGWFQLYSPGGVACDDDGELFASMVHILMGSCYKTKKFLLSLAENKLGPCMLLALRGNQTMVEILCLMLEYNIIDNNDTQLQIISTLESTDVGKRMYEQLCDRQRELKELQRKGGPTRLTLPSKSTDADLARLLSSGSFGNLENLSLAFTNVTSACAEHLIKLPSLKQLNLWSTQFGDAGLRLLSEHLTMLQVLNLCETPVTDAGLLALSSMKSLCSLNMNSTKLSADTYEDLKAKLPNLKEVDVRYTEAW

SEQ ID NO: 155 - protein, 1034 aa, Homo sapiens
MALIMEPVSKWSPSQVVDWMKGLDDCLQQYIKNFEREKISGDQLLRITHQELEDLGVSRIGHQELILEAVDLLCALNYGLETENLKTLSHKLNASAKNLQNFITGRRRSGHYDGRTSRKLPNDFLTSVVDLIGAAKSLLAWLDRSPFAAVTDYSVTRNNVIQLCLELTTIVQQDCTVYETENKILHVCKTLSGVCDHIISLSSDPLVSQSAHLEVIQLANIKPSEGLGMYIKSTYDGLHVITGTTENSPADRCKKIHAGDEVIQVNHQTVVGWQLKNLVNALREDPSGVILTLKKRPQSMLTSAPALLKNMRWKPLALQPLIPRSPTSSVATPSSTISTPTKRDSSALQDLYIPPPPAEPYIPRDEKGNLPCEDLRGHMVGKPVHKGSESPNSFLDQEYRKRFNIVEEDTVLYCYEYEKGRSSSQGRRESTPTYGKLRPISMPVEYNWVGDYEDPNKMKRDSRRENSLLRYMSNEKIAQEEYMFQRNSKKDTGKKSKKKGDKSNSPTHYSLLPSLQMDALRQDIMGTPVPETTLYHTFQQSSLQHKSKKKNKGPIAGKSKRRISCKDLGRGDCEGWLWKKKDAKSYFSQKWKKYWFVLKDASLYWYINEEDEKAEGFISLPEFKIDRASECRKKYAFKACHPKIKSFYFAAEHLDDMNRWLNRINMLTAGYAERERIKQEQDYWSESDKEEADTPSTPKQDSPPPPYDTYPRPPSMSCASPYVEAKHSRLSSTETSQSQSSHEEFRQEVTGSSAVSPIRKTASQRRSWQDLIETPLTSSGLHYLQTLPLEDSVFSDSAAISPEHRRQSTLPTQKCHLQDHYGPYPLAESERMQVLNGNGGKPRSFTLPRDSGFNHCCLNAPVSACDPQDDVQPPEVEEEEEEEEEEGEAAGENIGEKSESREEKLGDSLQDLYRALEQASLSPLGEHRISTKMEYKLSFIKRCNDPVMNEKLHRLRILKSTLKAREGEVAIIDKVLDNPDLTSKEFQQWKQMYLDLFLDICQNTTSNDPLSISSEVDVITSSLAHTHSYIETHV

SEQ ID NO: 156 - protein, 753 aa, Homo sapiens
MADKRKLQGEIDRCLKKVSEGVEQFEDIWQKLHNAANANQKEKYEADLKKEIKKLQRLRDQIKTWVASNEIKDKRQLIDNRKLIETQMERFKVVERETKTKAYSKEGLGLAQKVDPAQKEKEEVGQWLTNTIDTLNMQVDQFESEVESLSVQTRKKKGDKDKQDRIEGLKRHIEKHRYHVRMLETILRMLDNDSILVDAIRKIKDDVEYYVDSSQDPDFEENEFLYDDLDLEDIPQALVATSPPSHSHMEDEIFNQSSSTPTSTTSSSPIPPSPANCTTENSEDDKKRGRSTDSEVSQSPAKNGSKPVHSNQHPQSPAVPPTYPSGPPPAASALSTTPGNNGVPAPAAPPSALGPKASPAPSHNSGTPAPYAQAVAPPAPSGPSTTQPRPPSVQPSGGGGGGSGGGGSSSSSNSSAGGGAGKQNGATSYSSVVADSPAEVALSSSGGNNASSQALGPPSGPHNPPPSTSKEPSAAAPTGAGGVAPGSGNNSGGPSLLVPLPVNPPSSPTPSFSDAKAAGALLNGPPQFSTAPEIKAPEPLSSLKSMAERAAISSGIEDPVPTLHLTERDIILSSTSAPPASAQPPLQLSEVNIPLSLGVCPLGPVPLTKEQLYQQAMEEAAWHHMPHPSDSERIRQYLPRNPCPTPPYHHQMPPPHSDTVEFYQRLSTETLFFIFYYLEGTKAQYLAAKALKKQSWRFHTKYMMWFQRHEEPKTITDEFEQGTYIYFDYEKWGQRKKEGFTFEYRYLEDRDLQ

SEQ ID NO: 157-165 - skipped (9 entries)

SEQ ID NO: 166 - protein, 472 aa, Homo sapiens
MKSILDGLADTTFRTITTDLLYVGSNDIQYEDIKGDMASKLGYFPQKFPLTSFRGSPFQEKMTAGDNPQLVPADQVNITEFYNKSLSSFKENEENIQCGENFMDIECFMVLNPSQQLAIAVLSLTLGTFTVLENLLVLCVILHSRSLRCRPSYHFIGSLAVADLLGSVIFVYSFIDFHVFHRKDSRNVFLFKLGGVTASFTASVGSLFLTAIDRYISIHRPLAYKRIVTRPKAVVAFCLMWTIAIVIAVLPLLGWNCEKLQSVCSDIFPHIDETYLMFWIGVTSVLLLFIVYAYMYILWKAHSHAVRMIQRGTQKSIIIHTSEDGKVQVTRPDQARMDIRLAKTLVLILVVLIICWGPLLAIMVYDVFGKMNKLIKTVFAFCSMLCLLNSTVNPIIYALRSKDLRHAFRSMFPSCEGTAQPLDNSMGDSDCLHKHANNAASVHRAAESCIKSTVKIAKVTMSVSTDTSAEAL

SEQ ID NO: 167 - protein, 360 aa, Homo sapiens
MEECWVTEIANGSKDGLDSNPMKDYMILSGPQKTAVAVLCTLLGLLSALENVAVLYLILSSHQLRRKPSYLFIGSLAGADFLASVVFACSFVNFHVFHGVDSKAVFLLKIGSVTMTFTASVGSLLLTAIDRYLCLRYPPSYKALLTRGRALVTLGIMWVLSALVSYLPLMGWTCCPRPCSELFPLIPNDYLLSWLLFIAFLFSGIIYTYGHVLWKAHQHVASLSGHQDRQVPGMARMRLDVRLAKTLGLVLAVLLICWFPVLALMAHSLATTLSDQVKKAFAFCSMLCLINSMVNPVIYALRSGEIRSSAHHCLAHWKKCVRGLGSEAKEEAPRSSVTETEADGKITPWPDSRDLDLSDC

SEQ ID NO: 168 - protein, 1028 aa, Homo sapiens
MMFPWKQLILLSFIGCLGGELLLQGPVFIKEPSNSIFPVGSEDKKITLHCEARGNPSPHYRWQLNGSDIDMSMEHRYKLNGGNLVVINPNRNWDTGTYQCFATNSLGTIVSREAKLQFAYLENFKTKMRSTVSVREGQGVVLLCGPPPHSGELSYAWIFNEYPSFVEEDSRRFVSQETGHLYISKVEPSDVGNYTCVVTSMVTNARVLGSPTPLVLRSDGVMGEYEPKIEVQFPETLPAAKGSTVKLECFALGNPIPQINWRRSDGLPFSSKIKLRKFSGVLEIPNFQQEDAGSYECIAENSRGKNVARGRLTYYAKPHWVQLIKDVEIAVEDSLYWECRASGKPKPSYRWLKNGAALVLEERTQIENGALTISNLSVTDSGMFQCIAENKHGLVYSSAELKVVASAPDFSKNPMKKLVQVQVGSLVSLDCKPRASPRALSSWKKGDVSVQEHERISLLNDGGLKIANVTKADAGTYTCMAENQFGKANGTTHLVVTEPTRITLAPSNMDVSVGESVILPCQVQHDPLLDIIFTWYFNGALADFKKDGSHFEKVGGSSSGDLMIRNIQLKHSGKYVCMVQTGVDSVSSAADLIVRGSPGPPENVKVDEITDTTAQLSWKEGKDNHSPVISYSIQARTPFSVGWQTVTTVPEVIDGKTHTATVVELNPWVEYEFRVVASNKIGGGEPSLPSEKVRTEEAVPEVPPSEVNGGGGSRSELVITWDPVPEELQNGEGFGYVVAFRPLGVTTWIQTVVTSPDTPRYVFRNESIVPYSPYEVKVGVYNNKGEGPFSPVTTVFSAEEEPTVAPSQVSANSLSSSEIEVSWNTIPWKLSNGHLLGYEVRYWNGGGKEESSSKMKVAGNETSARLRGLKSNLAYYTAVRAYNSAGAGPFSATVNVTTKKTPPSQPPGNVVWNATDTKVLLNWEQVKAMENESEVTGYKVFYRTSSQNNVQVLNTNKTSAELVLPIKEDYIIEVKATTDGGDGTSSEQIRIPRITSMDARGSTSAISNVHPMSSYMPIVLFLIVYVLW

SEQ ID NO: 169 - protein, 1026 aa, Homo sapiens
MRLPWELLVLQSFILCLADDSTLHGPIFIQEPSPVMFPLDSEEKKVKLNCEVKGNPKPHIRWKLNGTDVDTGMDFRYSVVEGSLLINNPNKTQDAGTYQCTATNSFGTIVSREAKLQFAYLDNFKTRTRSTVSVRRGQGMVLLCGPPPHSGELSYAWIFNEYPSYQDNRRFVSQETGNLYIAKVEKSDVGNYTCVVTNTVTNHKVLGPPTPLILRNDGVMGEYEPKIEVQFPETVPTAKGATVKLECFALGNPVPTIIWRRADGKPIARKARRHKSNGILEIPNFQQEDAGLYECVAENSRGKNVARGQLTFYAQPNWIQKINDIHVAMEENVFWECKANGRPKPTYKWLKNGEPLLTRDRIQIEQGTLNITIVNLSDAGMYQCLAENKHGVIFSNAELSVIAVGPDFSRTLLKRVTLVKVGGEVVIECKPKASPKPVYTWKKGRDILKENERITISEDGNLRIINVTKSDAGSYTCIATNHFGTASSTGNLVVKDPTRVMVPPSSMDVTVGESIVLPCQVTHDHSLDIVFTWSFNGHLIDFDRDGDHFERVGGQDSAGDLMIRNIQLKHAGKYVCMVQTSVDRLSAAADLIVRGPPGPPEAVTIDEITDTTAQLSWRPGPDNHSPITMYVIQARTPFSVGWQAVSTVPELIDGKTFTATVVGLNPWVEYEFRTVAANVIGIGEPSRPSEKRRTEEALPEVTPANVSGGGGSKSELVITWETVPEELQNGRGFGYVVAFRPYGKMIWMLTVLASADASRYVFRNESVHPFSPFEVKVGVFNNKGEGPFSPTTVVYSAEEEPTKPPASIFARSLSATDIEVFWASPLEKNRGRIQGYEVKYWRHEDKEENARKIRTVGNQTSTKITNLKGSVLYHLAVKAYNSAGTGPSSATVNVTTRKPPPSQPPGNIIWNSSDSKIILNWDQVKALDNESEVKGYKVLYRWNRQSSTSVIETNKTSVELSLPFDEDYIIEIKPFSDGGDGSSSEQIRIPKISNAYARGSGASTSNACTLSAISTIMISLTARSSL

SEQ ID NO: 170 - protein, 1100 aa, Homo sapiens
MASSWKLMLFLSVTMCLSEYSKSLPGLSTSYAALLRIKKSSSSSLFGSKTRPRYSSPSLGTLSASSPSWLGAAQNYYSPINLYHSSDAFKQDESVDYGPVFVQEPDDIIFPTDSDEKKVALNCEVRGNPVPSYRWLRNGTEIDLESDYRYSLIDGTFIISNPSEAKDSGHYQCLATNTVGSILSREATLQFAYLGNFSGRTRSAVSVREGQGVVLMCSPPPHSPEIIYSWVFNEFPSFVAEDSRRFISQETGNLYISKVQTSDVGSYICLVKNTVTNARVLSPPTPLTLRNDGVMGEYEPKIEVHFPFTVTAAKGTTVKMECFALGNPVPTITWMKVNGYIPSKARLRKSQAVLEIPNVQLDDAGIYECRAENSRGKNSFRGQLQVYTYPHWVEKLNDTQLDSGSPLRWECKATGKPRPTYRWLKNGVPLSPQSRVEMVNGVLMIHNVNQSDAGMYQCLAENKYGAIYASAELKILASAPTFALNQLKKTIIVTKDQEVVIECKPQGSPKPTISWKKGDRAVRENKRIAILPDGSLRILNASKSDEGKYVCRGENVFGSAEIIASLSVKEPTRIELTPKRTELTVGESIVLNCKAIHDASLDVTFYWTLKGQPIDFEEEGGHFESIRAQASSADLMIRNILLMHAGRYGCRVQTTADSVSDEAELLVRGPPGPPGIVIVEEITESTATLSWSPAADNHSPISSYNLQARSPFSLGWQTVKTVPEIITGDMESAMAVDLNPWVEYEFRVVATNPIGTGDPSTPSRMIRTNEAVPKTAPTNVSGRSGRRHELVIAWEPVSEEFQNGEGFGYIVAFRPNGTRGWKEKMVTSSEASKFIYRDESVPPLTPFEVKVGVYNNKGDGPFSQIVVICSAEGEPSAAPTDVKATSVSVSEILVAWKHIKESLGRPQGFEVGYWKDMEQEDTAETVKTRGNESFVILTGLEGNTLYHFTVRAYNGAGYGPPSSEVSATTKKSPPSQAPSNLRWEQQGSQVSLGWEPVIPLANESEVVGYKVFYRQEGHSNSQVIETQKLQAVVPLPDAGVYIIEVRAYSEGGDGTASSQIRVPSYSGGKITSAQSTLHSLSTSSSSVTLLLALMIPSTSW

SEQ ID NO: 171 - protein, 1028 aa, Homo sapiens
MRLLWKLVILLPLINSSAGDGLLSRPIFTQEPHDVIFPLDLSKSEVILNCAANGYPSPHYRWKQNGTDIDFTMSYHYRLDGGSLAINSPHTDQDIGMYQCLATNLLGTILSRKAKLQFAYIEDFETKTRSTVSVREGQGVVLLCGPPPHFGDLSYAWTFNDNPLYVQEDNRRFVSQETGNLYIAKVEPSDVGNYTCFITNKEAQRSVQGPPTPLVQRTDGVMGEYEPKIEVRFPETIQAAKDSSVKLECFALGNPVPDISWRRLDGSPLPGKVKYSKSQAILEIPNFQQEDEGFYECIASNLRGRNLAKGQLIFYAPPEWEQKIQNTHLSIYDNLLWECKASGKPNPWYTWLKNGERLNPEERIQIENGTLIITMLNVSDSGVYQCAAENKYQIIYANAELRVLASAPDFSKSPVKKKSFVQVGGDIVIGCKPNAFPRAAISWKRGTETLRQSKRIFLLEDGSLKIYNITRSDAGSYTCIATNQFGTAKNTGSLIVKERTVITVPPSKMDVTVGESIVLPCQVSHDPSIEVVFVWFFNGDVIDLKKGVAHFERIGGESVGDLMIRNIQLHHSGKYLCTVQTTLESLSAVADIIVRGPPGPPEDVQVEDISSTTSQLSWRAGPDNNSPIQIFTIQTRTPFSVGWQAVATVPEILNGKTYNATVVGLSPWVEYEFRVVAGNSIGIGEPSEPSELLRTKASVPVVAPVNIHGGGGSRSELVITWESIPEELQNGEGFGYIIMFRPVGSTTWSKEKVSSVESSRFVYRNESIIPLSPFEVKVGVYNNEGEGSLSTVTIVYSGEDEPQLAPRGTSLQSFSASEMEVSWNAIAWNRNTGRVLGYEVLYWTDDSKESMIGKIRVSGNVTTKNITGLKANTIYFASVRAYNTAGTGPSSPPVNVTTKKSPPSQPPANIAWKLTNSKLCLNWEHVKTMENESEVLGYKILYRQNRQSKTHILETNNTSAELLVPFEEDYLIEIRTVSDGGDGSSSEEIRIPKMSSLSSRGIQFLEPSTHFLSIVIVIFHCFAIQPLI

SEQ ID NO: 172 - protein, 1331 aa, Homo sapiens
MQAAPRAGCGAALLLWIVSSCLCRAWTAPSTSQKCDEPLVSGLPHVAFSSSSSISGSYSPGYAKINKRGGAGGWSPSDSDHYQWLQVDFGNRKQISAIATQGRYSSSDWVTQYRMLYSDTGRNWKPYHQDGNIWAFPGNINSDGVVRHELQHPIIARYVRIVPLDWNGEGRIGLRIEVYGCSYWADVINFDGHVVLPYRFRNKKMKTLKDVIALNFKTSESEGVILHGEGQQGDYITLELKKAKLVLSLNLGSNQLGPIYGHTSVMTGSLLDDHHWHSVVIERQGRSINLTLDRSMQHFRTNGEFDYLDLDYEITFGGIPFSGKPSSSSRKNFKGCMESINYNGVNITDLARRKKLEPSNVGNLSFSCVEPYTVPVFFNATSYLEVPGRLNQDLFSVSFQFRTWNPNGLLVFSHFADNLGNVEIDLTESKVGVHINITQTKMSQIDISSGSGLNDGQWHEVRFLAKENFAILTIDGDEASAVRTNSPLQVKTGEKYFFGGFLNQMNNSSHSVLQPSFQGCMQLIQVDDQLVNLYEVAQRKPGSFANVSIDMCAIIDRCVPNHCEHGGKCSQTWDSFKCTCDETGYSGATCHNSIYEPSCEAYKHLGQTSNYYWIDPDGSGPLGPLKVYCNMTEDKVWTIVSHDLQMQTPVVGYNPEKYSVTQLVYSASMDQISAITDSAEYCEQYVSYFCKMSRLLNTPDGSPYTWWVGKANEKHYYWGGSGPGIQKCACGIERNCTDPKYYCNCDADYKQWRKDAGFLSYKDHLPVSQVVVGDTDRQGSEAKLSVGPLRCQGDRNYWNAASFPNPSSYLHFSTFQGETSADISFYFKTLTPWGVFLENMGKEDFIKLELKSATEVSFSFDVGNGPVEIVVRSPTPLNDDQWHRVTAERNVKQASLQVDRLPQQIRKAPTEGHTRLELYSQLFVGGAGGQQGFLGCIRSLRMNGVTLDLEERAKVTSGFISGCSGHCTSYGTNCENGGKCLERYHGYSCDCSNTAYDGTFCNKDVGAFFEEGMWLRYNFQAPATNARDSSSRVDNAPDQQNSHPDLAQEEIRFSFSTTKAPCILLYISSFTTDFLAVLVKPTGSLQIRYNLGGTREPYNIDVDHRNMANGQPHSVNITRHEKTIFLKLDHYPSVSYHLPSSSDTLFNSPKSLFLGKVIETGKIDQEIHKYNTPGFTGCLSRVQFNQIAPLKAALRQTNASAHVHIQGELVESNCGASPLTLSPMSSATDPWHLDHLDSASADFPYNPGQGQAIRNGVNRNSAIIGGVIAVVIFTILCTLVFLIRYMFRHKGTYHTNEAKGAESAESADAAIMNNDPNFTETIDESKKEWLI

SEQ ID NO: 173 - skipped

SEQ ID NO: 174 - protein, 1288 aa, Homo sapiens
MASVAWAVLKVLLLLPTQTWSPVGAGNPPDCDAPLASALPRSSFSSSSELSSSHGPGFSRLNRRDGAGGWTPLVSNKYQWLQIDLGERMEVTAVATQGGYGSSDWVTSYLLMFSDGGRNWKQYRREESIWGFPGNTNADSVVHYRLQPPFEARFLRFLPLAWNPRGRIGMRIEVYGCAYKSEVVYFDGQSALLYRLDKKPLKPIRDVISLKFKAMQSNGILLHREGQHGNHITLELIKGKLVFFLNSGNAKLPSTIAPVTLTLGSLLDDQHWHSVLIELLDTQVNFTVDKHTHHFQAKGDSSYLDLNFEISFGGIPTPGRSRAFRRKSFHGCLENLYYNGVDVTELAKKHKPQILMMGNVSFSCPQPQTVPVTFLSSRSYLALPGNSGEDKVSVTFQFRTWNRAGHLLFGELRRGSGSFVLFLKDGKLKLSLFQPGQSPRNVTAGAGLNDGQWHSVSFSAKWSHMNVVVDDDTAVQPLVAVLIDSGDTYYFGGCLDNSSGSGCKSPLGGFQGCLRLITIGDKAVDPILVQQGALGSFRDLQIDSCGITDRCLPSYCEHGGECSQSWDTFSCDCLGTGYTGETCHSSLYEQSCEAHKHRGNPSGLYYIDADGSGPLGPFLVYCNMTADAAWTVVQHGGPDAVTLRGAPSGHPRSAVSFAYAAGAGQLRSAVNLAERCEQRLALRCGTARRPDSRDGTPLSWWVGRTNETHTSWGGSLPDAQKCTCGLEGNCIDSQYYCNCDAGRNEWTSDTIVLSQKEHLPVTQIVMTDAGRPHSEAAYTLGPLLCRGDQSFWNSASFNTETSYLHFPAFHGELTADVCFFFKTTVSSGVFMENLGITDFIRIELRAPTEVTFSFDVGNGPCEVTVQSPTPFNDNQWHHVRAERNVKGASLQVDQLPQKMQPAPADGHVRLQLNSQLFIGGTATRQRGFLGCIRSLQLNGVALDLEERATVTPGVEPGCAGHCSTYGHLCRNGGRCREKRRGVTCDCAFSAYDGPFCSNEISAYFATGSSMTYHFQEHYTLSENSSSLVSSLHRDVTLTREMITLSFRTTRTPSLLLYVSSFYEEYLSVILANNGSLQIRYKLDRHQNPDAFTFDFKNMADGQLHQVKINREEAVVMVEVNQSTKKQVILSSGTEFNAVKSLILGKVLEAAGADPDTRRAATSGFTGCLSAVRFGRAAPLKAALRPSGPSRVTVRGHVAPMARCAAGAASGSPARELAPRLAGGAGRSGPADEGEPLVNADRRDSAVIGGVIAVVIFILLCITAIAIRIYQQRKLRKENESKVSKKEEC

SEQ ID NO: 175 - protein, 1308 aa, Homo sapiens
MGSVTGAVLKTLLLLSTQNWNRVEAGNSYDCDDPLVSALPQASFSSSSELSSSHGPGFARLNRRDGAGGWSPLVSNKYQWLQIDLGERMEVTAVATQGGYGSSNWVTSYLLMFSDSGWNWKQYRQEDSIWGFSGNANADSVVYYRLQPSIKARFLRFIPLEWNPKGRIGMRIEVFGCAYRSEVVDLDGKSSLLYRFDQKSLSPIKDIISLKFKTMQSDGILLHREGPNGDHITLQLRRARLFLLINSGEAKLPSTSTLVNLTLGSLLDDQHWHSVLIQRLGKQVNFTVDEHRHHFHARGEFNLMNLDYEISFGGIPAPGKSVSFPHRNFHGCLENLYYNGVDIIDLAKQQKPQIIAMGNVSFSCSQPQSMPVTFLSSRSYLALPDFSGEEEVSATFQFRTWNKAGLLLFSELQLISGGILLFLSDGKLKSNLYQPGKLPSDITAGVELNDGQWHSVSLSAKKNHLSVAVDGQMASAAPLLGPEQIYSGGTYYFGGCPDKSFGSKCKSPLGGFQGCMRLISISGKVVDLISVQQGSLGNFSDLQIDSCGISDRCLPNYCEHGGECSQSWSTFHCNCTNTGYRGATCHNSIYEQSCEAYKHRGNTSGFYYIDSDGSGPLEPFLLYCNMTETAWTIIQHNGSDLTRVRNTNPENPYAGFFEYVASMEQLQATINRAEHCEQEFTYYCKKSRLVNKQDGTPLSWWVGRTNETQTYWGGSSPDLQKCTCGLEGNCIDSQYYCNCDADRNEWTNDTGLLAYKEHLPVTKIVITDTGRLHSEAAYKLGPLLCQGDRSFWNSASFDTEASYLHFPTFHGELSADVSFFFKTTASSGVFLENLGIADFIRIELRSPTVVTFSFDVGNGPFEISVQSPTHFNDNQWHHVRVERNMKEASLQVDQLTPKTQPAPADGHVLLQLNSQLFVGGTATRQRGFLGCIRSLQLNGMTLDLEERAQVTPEVQPGCRGHCSSYGKLCRNGGKCRERPIGFFCDCTFSAYTGPFCSNEISAYFGSGSSVIYNFQENYLLSKNSSSHAASFHGDMKLSREMIKFSFRTTRTPSLLLFVSSFYKEYLSVIIAKNGSLQIRYKLNKYQEPDVVNFDFKNMADGQLHHIMINREEGVVFIEIDDNRRRQVHLSSGTEFSAVKSLVLGRILEHSDVDQDTALAGAQGFTGCLSAVQLSHVAPLKAALHPSHPDPVTVTGHVTESSCMAQPGTDATSRERTHSFADHSGTIDDREPLANAIKSDSAVIGGLIAVVIFILLCITAIAVRIYQQKRLYKRSEAKRSENVDSAEAVLKSELNIQNAVNENQKEYFF

SEQ ID NO: 176 - protein, 1306 aa, Homo sapiens
MDSLPRLTSVLTLLFSGLWHLGLTATNYNCDDPLASLLSPMAFSSSSDLTGTHSPAQLNWRVGTGGWSPADSNAQQWLQMDLGNRVEITAVATQGRYGSSDWVTSYSLMFSDTGRNWKQYKQEDSIWTFAGNMNADSVVHHKLLHSVRARFVRFVPLEWNPSGKIGMRVEVYGCSYKSDVADFDGRSSLLYRFNQKLMSTLKDVISLKFKSMQGDGVLFHGEGQRGDHITLELQKGRLALHLNLGDSKARLSSSLPSATLGSLLDDQHWHSVLIERVGKQVNFTVDKHTQHFRTKGETDALDIDYELSFGGIPVPGKPGTFLKKNFHGCIENLYYNGVNIIDLAKRRKHQIYTGNVTFSCSEPQIVPITFVNSSGSYLLLPGTPQIDGLSVSFQFRTWNKDGLLLSTELSEGSGTLLLSLEGGILRLVIQKMTERVAEILTGSNLNDGLWHSVSINARRNRITLTLDDEAAPPAPDSTWVQIYSGNSYYFGGCPDNLTDSQCLNPIKAFQGCMRLIFIDNQPKDLISVQQGSLGNFSDLHIDLCSIKDRCLPNYCEHGGSCSQSWTTFYCNCSDTSYTGATCHNSIYEQSCEVYRHQGNTAGFFYIDSDGSGPLGPLQVYCNITEDKIWTSVQHNNTELTRVRGANPEKPYAMALDYGGSMEQLEAVIDGSEHCEQEVAYHCRRSRLLNTPDGTPFTWWIGRSNERHPYWGGSPPGVQQCECGLDESCLDIQHFCNCDADKDEWTNDTGFLSFKDHLPVTQIVITDTDRSNSEAAWRIGPLRCYGDRRFWNAVSFYTEASYLHFPTFHAEFSADISFFFKTTALSGVFLENLGIKDFIRLEISSPSEITFAIDVGNGPVELVVQSPSLLNDNQWHYVRAERNLKETSLQVDNLPRSTRETSEEGHFRLQLNSQLFVGGTSSRQKGFLGCIRSLHLNGQKMDLEERAKVTSGVRPGCPGHCSSYGSICHNGGKCVEKHNGYLCDCTNSPYEGPFCKKEVSAVFEAGTSVTYMFQEPYPVTKNISLSSSAIYTDSAPSKENIALSFVTTQAPSLLLFINSSSQDFVVVLLCKNGSLQVRYHLNKEETHVFTIDADNFANRRMHHLKINREGRELTIQMDQQLRLSYNFSPEVEFRVIRSLTLGKVTENLGLDSEVAKANAMGFAGCMSSVQYNHIAPLKAALRHATVAPVTVHGTLTESSCGFMVDSDVNAVTTVHSSSDPFGKTDEREPLTNAVRSDSAVIGGVIAVVIFIIFCIIGIMTRFLYQHKQSHRTSQMKEKEYPENLDSSFRNEIDLQNTVSECKREYFI

SEQ ID NO: 177 - protein, 2442 aa, Homo sapiens
MAENLLDGPPNPKRAKLSSPGFSANDSTDFGSLFDLENDLPDELIPNGGELGLLNSGNLVPDAASKHKQLSELLRGGSGSSINPGIGNVSASSPVQQGLGGQAQGQPNSANMASLSAMGKSPLSQGDSSAPSLPKQAASTSGPTPAASQALNPQAQKQVGLATSSPATSQTGPGICMNANFNQTHPGLLNSNSGHSLINQASQGQAQVMNGSLGAAGRGRGAGMPYPTPAMQGASSSVLAETLTQVSPQMTGHAGLNTAQAGGMAKMGITGNTSPFGQPFSQAGGQPMGATGVNPQLASKQSMVNSLPTFPTDIKNTSVTNVPNMSQMQTSVGIVPTQAIATGPTADPEKRKLIQQQLVLLLHAHKCQRREQANGEVRACSLPHCRTMKNVLNHMTHCQAGKACQVAHCASSRQIISHWKNCTRHDCPVCLPLKNASDKRNQQTILGSPASGIQNTIGSVGTGQQNATSLSNPNPIDPSSMQRAYAALGLPYMNQPQTQLQPQVPGQQPAQPQTHQQMRTLNPLGNNPMNIPAGGITTDQQPPNLISESALPTSLGATNPLMNDGSNSGNIGTLSTIPTAAPPSSTGVRKGWHEHVTQDLRSHLVHKLVQAIFPTPDPAALKDRRMENLVAYAKKVEGDMYESANSRDEYYHLLAEKIYKIQKELEEKRRSRLHKQGILGNQPALPAPGAQPPVIPQAQPVRPPNGPLSLPVNRMQVSQGMNSFNPMSLGNVQLPQAPMGPRAASPMNHSVQMNSMGSVPGMAISPSRMPQPPNMMGAHTNNMMAQAPAQSQFLPQNQFPSSSGAMSVGMGQPPAQTGVSQGQVPGAALPNPLNMLGPQASQLPCPPVTQSPLHPTPPPASTAAGMPSLQHTTPPGMTPPQPAAPTQPSTPVSSSGQTPTPTPGSVPSATQTQSTPTVQAAAQAQVTPQPQTPVQPPSVATPQSSQQQPTPVHAQPPGTPLSQAAASIDNRVPTPSSVASAETNSQQPGPDVPVLEMKTETQAEDTEPDPGESKGEPRSEMMEEDLQGASQVKEETDIAEQKSEPMEVDEKKPEVKVEVKEEEESSSNGTASQSTSPSQPRKKIFKPEELRQALMPTLEALYRQDPESLPFRQPVDPQLLGIPDYFDIVKNPMDLSTIKRKLDTGQYQEPWQYVDDVWLMFNNAWLYNRKTSRVYKFCSKLAEVFEQEIDPVMQSLGYCCGRKYEFSPQTLCCYGKQLCTIPRDAAYYSYQNRYHFCEKCFTEIQGENVTLGDDPSQPQTTISKDQFEKKKNDTLDPEPFVDCKECGRKMHQICVLHYDIIWPSGFVCDNCLKKTGRPRKENKFSAKRLQTTRLGNHLEDRVNKFLRRQNHPEAGEVFVRVVASSDKTVEVKPGMKSRFVDSGEMSESFPYRTKALFAFEEIDGVDVCFFGMHVQEYGSDCPPPNTRRVYISYLDSIHFFRPRCLRTAVYHEILIGYLEYVKKLGYVTGHIWACPPSEGDDYIFHCHPPDQKIPKPKRLQEWYKKMLDKAFAERIIHDYKDIFKQATEDRLTSAKELPYFEGDFWPNVLEESIKELEQEEEERKKEESTAASETTEGSQGDSKNAKKKNNKKTNKNKSSISRANKKKPSMPNVSNDLSQKLYATMEKHKEVFFVIHLHAGPVINTLPPIVDPDPLLSCDLMDGRDAFLTLARDKHWEFSSLRRSKWSTLCMLVELHTQGQDRFVYTCNECKHHVETRWHCTVCEDYDLCINCYNTKSHAHKMVKWGLGLDDEGSSQGEPQSKSPQESRRLSIQRCIQSLVHACQCRNANCSLPSCQKMKRVVQHTKGCKRKTNGGCPVCKQLIALCCYHAKHCQENKCPVPFCLNIKHKLRQQQIQHRLQQAQLMRRRMATMNTRNVPQQSLPSPTSAPPGTPTQQPSTPQTPQPPAQPQPSPVSMSPAGFPSVARTQPPTTVSTGKPTSQVPAPPPPAQPPPAAVEAARQIEREAQQQQHLYRVNINNSMPPGRTGMGTPGSQMAPVSLNVPRPNQVSGPVMPSMPPGQWQQAPLPQQQPMPGLPRPVISMQAQAAVAGPRMPSVQPPRSISPSALQDLLRTLKSPSSPQQQQQVLNILKSNPQLMAAFIKQRTAKYVANQPGMQPQPGLQSQPGMQPQPGMHQQPSLQNLNAMQAGVPRPGVPPQQQAMGGLNPQGQALNIMNPGHNPNMASMNPQYREMLRRQLLQQQQQQQQQQQQQQQQQQGSAGMAGGMAGHGQFQQPQGPGGYPPAMQQQQRMQQHLPLQGSSMGQMAAQMGQLGQMGQPGLGADSTPNIQQALQQRILQQQQMKQQIGSPGQPNPMSPQQHMLSGQPQASHLPGQQIATSLSNQVRSPAPVQSPRPQSQPPHSSPSPRIQPQPSPHHVSPQTGSPHPGLAVTMASSIDQGHLGNPEQSAMLPQLNTPSRSALSSELSLVGDTTGDTLEKFVEGL

SEQ ID NO: 178 - protein, 438 aa, Homo sapiens
MRGPSGPPGLLYVPHLLLCLLCLLPPPLQYAAGQSQMPKDQPLWALLEQYCHTIMTLTNLSGPYSYCNTTLDQIGTCWPRSAAGALVERPCPEYFNGVKYNTTRNAYRECLENGTWASKINYSQCEPILDDKQRKYDLHYRIALVVNYLGHCVSVAALVAAFLLFLALRSIRCLRNVIHWNLITTFILRNVMWFLLQLVDHEVHESNEVWCRCITTIFNYFVVTNFFWMFVEGCYLHTAIVMTYSTERLRKCLFLFIGWCIPFPIIVAWAIGKLYYENEQCWFGKEPGDLVDYIYQGPIILVLLINFVFLFNIVRILMTKLRASTTSETIQYRKAVKATLVLLPLLGITYMLFFVNPGEDDLSQIMFIYFNSFLQSFQGFFVSVFYCFFNGEVRSAVRKRWHRWQDHHSLRVPMARAMSIPTSPTRISFHSIKQTAAV

SEQ ID NO: 179 - protein, 3564 aa, Homo sapiens
MTAWRRFQSLLLLLGLLVLCARLLTAAKGQNCGGLVQGPNGTIESPGFPHGYPNYANCTWIIITGERNRIQLSFHTFALEEDFDILSVYDGQPQQGNLKVRLSGFQLPSSIVSTGSILTLWFTTDFAVSAQGFKALYEVLPSHTCGNPGEILKGVLHGTRFNIGDKIRYSCLPGYILEGHAILTCIVSPGNGASWDFPAPFCRAEGACGGTLRGTSSSISSPHFPSEYENNADCTWTILAEPGDTIALVFTDFQLEEGYDFLEISGTEAPSIWLTGMNLPSPVISSKNWLRLHFTSDSNHRRKGFNAQFQVKKAIELKSRGVKMLPSKDGSHKNSVLSQGGVALVSDMCPDPGIPENGRRAGSDFRVGANVQFSCEDNYVLQGSKSITCQRVTETLAAWSDHRPICRARTCGSNLRGPSGVITSPNYPVQYEDNAHCVWVITTTDPDKVIKLAFEEFELERGYDTLTVGDAGKVGDTRSVLYVLTGSSVPDLIVSMSNQMWLHLQSDDSIGSPGFKAVYQEIEKGGCGDPGIPAYGKRTGSSFLHGDTLTFECPAAFELVGERVITCQQNNQWSGNKPSCVFSCFFNFTASSGIILSPNYPEEYGNNMNCVWLIISEPGSRIHLIFNDFDVEPQFDFLAVKDDGISDITVLGTFSGNEVPSQLASSGHIVRLEFQSDHSTTGRGFNITYTTFGQNECHDPGIPINGRRFGDRFLLGSSVSFHCDDGFVKTQGSESITCILQDGNVVWSSTVPRCEAPCGGHLTASSGVILPPGWPGYYKDSLHCEWIIEAKPGHSIKITFDRFQTEVNYDTLEVRDGPASSSPLIGEYHGTQAPQFLISTGNFMYLLFTTDNSRSSIGFLIHYESVTLESDSCLDPGIPVNGHRHGGDFGIRSTVTFSCDPGYTLSDDEPLVCERNHQWNHALPSCDALCGGYIQGKSGTVLSPGFPDFYPNSLNCTWTIEVSHGKGVQMIFHTFHLESSHDYLLITEDGSFSEPVARLTGSVLPHTIKAGLFGNFTAQLRFISDFSISYEGFNITFSEYDLEPCDDPGVPAFSRRIGFHFGVGDSLTFSCFLGYRLEGATKLTCLGGGRRVWSAPLPRCVAECGASVKGNEGTLLSPNFPSNYDNNHECIYKIETEAGKGIHLRTRSFQLFEGDTLKVYDGKDSSSRPLGTFTKNELLGLILNSTSNHLWLEFNTNGSDTDQGFQLTYTSFDLVKCEDPGIPNYGYRIRDEGHFTDTVVLYSCNPGYAMHGSNTLTCLSGDRRVWDKPLPSCIAECGGQIHAATSGRILSPGYPAPYDNNLHCTWIIEADPGKTISLHFIVFDTEMAHDILKVWDGPVDSDILLKEWSGSALPEDIHSTFNSLTLQFDSDFFISKSGFSIQFSTSIAATCNDPGMPQNGTRYGDSREAGDTVTFQCDPGYQLQGQAKITCVQLNNRFFWQPDPPTCIAACGGNLTGPAGVILSPNYPQPYPPGKECDWRVKVNPDFVIALIFKSFNMEPSYDFLHIYEGEDSNSPLIGSYQGSQAPERIESSGNSLFLAFRSDASVGLSGFAIEFKEKPREACFDPGNIMNGTRVGTDFKLGSTITYQCDSGYKILDPSSITCVIGADGKPSWDQVLPSCNAPCGGQYTGSEGVVLSPNYPHNYTAGQICLYSITVPKEFVVFGQFAYFQTALNDLAELFDGTHAQARLLSSLSGSHSGETLPLATSNQILLRFSAKSGASARGFHFVYQAVPRTSDTQCSSVPEPRYGRRIGSEFSAGSIVRFECNPGYLLQGSTALHCQSVPNALAQWNDTIPSCVVPCSGNFTQRRGTILSPGYPEPYGNNLNCIWKIIVTEGSGIQIQVISFATEQNWDSLEIHDGGDVTAPRLGSFSGTTVPALLNSTSNQLYLHFQSDISVAAAGFHLEYKTVGLAACQEPALPSNSIKIGDRYMVNDVLSFQCEPGYTLQGRSHISCMPGTVRRWNYPSPLCIATCGGTLSTLGGVILSPGFPGSYPNNLDCTWRISLPIGYGAHIQFLNFSTEANHDFLEIQNGPYHTSPMIGQFSGTDLPAALLSTTHETLIHFYSDHSQNRQGFKLAYQAYELQNCPDPPPFQNGYMINSDYSVGQSVSFECYPGYILIGHPVLTCQHGINRNWNYPFPRCDAPCGYNVTSQNGTIYSPGFPDEYPILKDCIWLITVPPGHGVYINFTLLQTEAVNDYIAVWDGPDQNSPQLGVFSGNTALETAYSSTNQVLLKFHSDFSNGGFFVLNFHAFQLKKCQPPPAVPQAEMLTEDDDFEIGDFVKYQCHPGYTLVGTDILTCKLSSQLQFEGSLPTCEAQCPANEVRTGSSGVILSPGYPGNYFNSQTCSWSIKVEPNYNITIFVDTFQSEKQFDALEVFDGSSGQSPLLVVLSGNHTEQSNFTSRSNQLYLRWSTDHATSKKGFKIRYAAPYCSLTHPLKNGGILNRTAGAVGSKVHYFCKPGYRMVGHSNATCRRNPLGMYQWDSLTPLCQAVSCGIPESPGNGSFTGNEFTLDSKVVYECHEGFKLESSQQATAVCQEDGLWSNKGKPPTCKPVACPSIEAQLSEHVIWRLVSGSLNEYGAQVLLSCSPGYYLEGWRLLRCQANGTWNIGDERPSCRVISCGSLSFPPNGNKIGTLTVYGATAIFTCNTGYTLVGSHVRECLANGLWSGSETRCLAGHCGSPDPIVNGHISGDGFSYRDTVVYQCNPGFRLVGTSVRICLQDHKWSGQTPVCVPITCGHPGNPAHGFTNGSEFNLNDVVNFTCNTGYLLQGVSRAQCRSNGQWSSPLPTCRVVNCSDPGFVENAIRHGQQNFPESFEYGMSILYHCKKGFYLLGSSALTCMANGLWDRSLPKCLAISCGHPGVPANAVLTGELFTYGAVVHYSCRGSESLIGNDTRVCQEDSHWSGALPHCTGNNPGFCGDPGTPAHGSRLGDDFKTKSLLRFSCEMGHQLRGSPERTCLLNGSWSGLQPVCEAVSCGNPGTPTNGMIVSSDGILFSSSVIYACWEGYKTSGLMTRHCTANGTWTGTAPDCTIISCGDPGTLANGIQFGTDFTFNKTVSYQCNPGYVMEAVTSATIRCTKDGRWNPSKPVCKAVLCPQPPPVQNGTVEGSDFRWGSSISYSCMDGYQLSHSAILSCEGRGVWKGEIPQCLPVFCGDPGIPAEGRLSGKSFTYKSEVFFQCKSPFILVGSSRRVCQADGTWSGIQPTCIDPAHNTCPDPGTPHFGIQNSSRGYEVGSTVFFRCRKGYHIQGSTTRTCLANLTWSGIQTECIPHACRQPETPAHADVRAIDLPTFGYTLVYTCHPGFFLAGGSEHRTCKADMKWTGKSPVCKSKGVREVNETVTKTPVPSDVFFVNSLWKGYYEYLGKRQPATLTVDWFNATSSKVNATFSEASPVELKLTGIYKKEEAHLLLKAFQIKGQADIFVSKFENDNWGLDGYVSSGLERGGFTFQGDIHGKDFGKFKLERQDPLNPDQDSSSHYHGTSSGSVAAAILVPFFALILSGFAFYLYKHRTRPKVQYNGYAGHENSNGQASFENPMYDTNLKPTEAKAVRFDTTLNTVCTVV

SEQ ID NO: 180 - protein, 415 aa, Homo sapiens [sequence omitted]

SEQ ID NO: 181 - protein, 727 aa, Homo sapiens
MEGDAVEAIVEESETFIKGKERKTYQRRREGGQEEDACHLPQNQTDGGEVVQDVNSSVQMVMMEQLDPTLLQMKTEVMEGTVAPEAEAAVDDTQIITLQVVNMEEQPINIGELQLVQVPVPVTVPVATTSVEELQGAYENEVSKEGLAESEPMICHTLPLPEGFQVVKVGANGEVETLEQGELPPQEDPSWQKDPDYQPPAKKTKKTKKSKLRYTEEGKDVDVSVYDFEEEQQEGLLSEVNAEKVVGNMKPPKPTKIKKKGVKKTFQCELCSYTCPRRSNLDRHMKSHTDERPHKCHLCGRAFRTVTLLRNHLNTHTGTRPHKCPDCDMAFVTSGELVRHRRYKHTHEKPFKCSMCDYASVEVSKLKRHIRSHTGERPFQCSLCSYASRDTYKLKRHMRTHSGEKPYECYICHARFTQSGTMKMHILQKHTENVAKFHCPHCDTVIARKSDLGVHLRKQHSYIEQGKKCRYCDAVFHERYALIQHQKSHKNEKRFKCDQCDYACRQERHMIMHKRTHTGEKPYACSHCDKTFRQKQLLDMHFKRYHDPNFVPAAFVCSKCGKTFTRRNTMARHADNCAGPDGVEGENGGETKKSKRGRKRKMRSKKEDSSDSENAEPDLDDNEDEEEPAVEIEPEPEPQPVTPAPPPAKKRRGRPPGRTNQPKQNQPTAIIQVEDQNTGAIENIIVEVKKEPDAEPAEGEEEEAQPAATDAPNGDLTPEMILSMMDR

SEQ ID NO: 182 - protein, 895 aa, Homo sapiens
MSAETPITLNIDPQDLQVQTFTVEKLLEPLIIQVTTLVNCPQNPSSRKKGRSKRASVLLASVEEATWNLLDKGEKIAQEATVLKDELTASLEEVRKESEALKVSAERFTDDPCFLPKREAVVQAARALLAAVTRLLILADMIDVMCLLQHVSAFQRTFESLKNVANKSDLQKTYQKLGKELENLDYLAFKRQQDLKSPNQRDEIAGARASLKENSPLLHSICSACLEHSDVASLKASKDTVCEEIQNALNVISNASQGIQNMTTPPEPQAATLGSALDELENLIVLNPLTVTEEEIRPSLEKRLEAIISGAALLADSSCTRDLHRERIIAECNAIRQALQDLLSEYMNNAGKKERSNTLNIALDNMCKKTRDLRRQLRKAIIDHVSDSFLDTTVPLLVLIEAAKNGREKEIKEYAAIFHEHTSRLVEVANLACSMSTNEDGIKIVKIAANHLETLCPQIINAALALAARPKSQAVKNTMEMYKRTWENHIHVLTEAVDDITSIDDFLAVSESHILEDVNKCIIALRDQDADNLDRAAGAIRGRAARVAHIVTGEMDSYEPGAYTEGVMRNVNFLTSTVIPEFVTQVNVALEALSKSSLNVLDDNQFVDISKKIYDTIHDIRCSVMMIRTPEELEDVSDLEEEHEVRSHTSIQTEGKTDRAKMTQLPEAEKEKIAEQVADFKKVKSKLDAEIEIWDDTSNDIIVLAKNMCMIMMEMTDFTRGKGPLKHTTDVIYAAKMISESGSRMDVLARQIANQCPDPSCKQDLLAYLEQIKFYSHQLKICSQVKAEIQNLGGELIMSALDSVTSLIQAAKNLMNAVVQTVKMSYIASTKIIRIQSPAGPRHPVVMWRMKAPAKKPLIKREKPEETCAAVRRGSAKKKIHPLQVMSEFRGRQIY

SEQ ID NO: 183 - protein, 781 aa, Homo sapiens
MATQADLMELDMAMEPDRKAAVSHWQQQSYLDSGIHSGATTTAPSLSGKGNPEEEDVDTSQVLYEWEQGFSQSFTQEQVADIDGQYAMTRAQRVRAAMFPETLDEGMQIPSTQFDAAHPTNVQRLAEPSQMLKHAVVNLINYQDDAELATRAIPELTKLLNDEDQVVVNKAAVMVHQLSKKEASRHAIMRSPQMVSAIVRTMQNTNDVETARCTAGTLHNLSHHREGLLAIFKSGGIPALVKMLGSPVDSVLFYAITTLHNLLLHQEGAKMAVRLAGGLQKMVALLNKTNVKFLAITTDCLQILAYGNQESKLIILASGGPQALVNIMRTYTYEKLLWTTSRVLKVLSVCSSNKPAIVEAGGMQALGLHLTDPSQRLVQNCLWTLRNLSDAATKQEGMEGLLGTLVQLLGSDDINVVTCAAGILSNLTCNNYKNKMMVCQVGGIEALVRTVLRAGDREDITEPAICALRHLTSRHQEAEMAQNAVRLHYGLPVVVKLLHPPSHWPLIKATVGLIRNLALCPANHAPLREQGAIPRLVQLLVRAHQDTQRRTSMGGTQQQFVEGVRMEEIVEGCTGALHILARDVHNRIVIRGLNTIPLFVQLLYSPIENIQRVAAGVLCELAQDKEAAEAIEAEGATAPLTELLHSRNEGVATYAAAVLFRMSEDKPQDYKKRLSVELTSSLFRTEPMAWNETADLGLDIGAQGEPLGYRQDDPSYRSFHSGGYGQDALGMDPMMEHEMGGHHPGADYPVDGLPDLGHAQDLMDGLPPGDSNQLAWFDTDL

SEQ ID NO: 184 - protein, 1225 aa, Homo sapiens
MFARKPPGAAPLGAMPVPDQPSSASEKTSSLSPGLNTSNGDGSETETTSAILASVKEQELQFERLTRELEAERQIVASQLERCKLGSETGSMSSMSSAEEQFQWQSQDGQKDIEDELTTGLELVDSCIRSLQESGILDPQDYSTGERPSLLSQSALQLNSKPEGSFQYPASYHSNQTLALGETTPSQLPARGTQARATGQSFSQGTTSRAGHLAGPEPAPPPPPPPREPFAPSLGSAFHLPDAPPAAAAAALYYSSSTLPAPPRGGSPLAAPQGGSPTKLQRGGSAPEGATYAAPRGSSPKQSPSRLAKSYSTSSPINIVVSSAGLSPIRVTSPPTVQSTISSSPIHQLSSTIGTYATLSPTKRLVHASEQYSKHSQELYATATLQRPGSLAAGSRASYSSQHGHLGPELRALQSPEHHIDPIYEDRVYQKPPMRSLSQSQGDPLPPAHTGTYRTSTAPSSPGVDSVPLQRTGSQHGPQNAAAATFQRASYAAGPASNYADPYRQLQYCPSVESPYSKSGPALPPEGTLARSPSIDSIQKDPREFGWRDPELPEVIQMLQHQFPSVQSNAAAYLQHLCFGDNKIKAEIRRQGGIQLLVDLLDHRMTEVHRSACGALRNLVYGKANDDNKIALKNCGGIPALVRLLRKTTDLEIRELVTGVLWNLSSCDALKMPIIQDALAVLTNAVIIPHSGWENSPLQDDRKIQLHSSQVLRNATGCLRNVSSAGEEARRRMRECDGLTDALLYVIQSALGSSEIDSKTVENCVCILRNLSYRLAAETSQGQHMGTDELDGLLCGEANGKDAESSGCWGKKKKKKKSQDQWDGVGPLPDCAEPPKGIQMLWHPSIVKPYLTLLSECSNPDTLEGAAGALQNLAAGSWKWSVYIRAAVRKEKGLPILVELLRIDNDRVVCAVATALRNMALDVRNKELIGKYAMRDLVHRLPGGNNSNNTASKAMSDDTVTAVCCTLHEVITKNMENAKALRDAGGIEKLVGISKSKGDKHSPKVVKAASQVLNSMWQYRDLRSLYKKDGWSQYHFVASSSTIERDRQRPYSSSRTPSISPVRVSPNNRSASAPASPREMISLKERKTDYECTGSNATYHGAKGEHTSRKDAMTAQNTGISTLYRNSYGAPAEDIKHNQVSAQPVPQEPSRKDYETYQPFQNSTRNYDESFFEDQVHHRPPASEYTMHLGLKSTGNYVDFYSAARPYSELNYETSHYPASPDSWV

SEQ ID NO: 185 - protein, 1663 aa, Homo sapiens
MATDGASCEPDLSRAPEDAAGAAAEAAKKEFDVDTLSKSELRMLLSVMEGELEARDLVIEALRARRKEVFIQERYGRFNLNDPFLALQRDYEAGAGDKEKKPVCTNPLSILEAVMAHCKKMQERMSAQLAAAESRQKKLEMEKLQLQALEQEHKKLAARLEEERGKNKQVVLMLVKECKQLSGKVIEEAQKLEDVMAKLEEEKKKTNELEEELSAEKRRSTEMEAQMEKQLSEFDTEREQLRAKLNREEAHTTDLKEEIDKMRKMIEQLKRGSDSKPSLSLPRKTKDRRLVSISVGTEGTVTRSVACQTDLVTENADHMKKLPLTMPVKPSTGSPLVSANAKGSVCTSATMARPGIDRQASYGDLIGASVPAFPPPSANKIEENGPSTGSTPDPTSSTPPLPSNAAPPTAQTPGIAPQNSQAPPMHSLHSPCANTSLHPGLNPRIQAARFRFQGNANDPDQNGNTTQSPPSRDVSPTSRDNLVAKQLARNTVTQALSRFTSPQAGAPSRPGVPPTGDVGTHPPVGRTSLKTHGVARVDRGNPPPIPPKKPGLSQTPSPPHPQLKVIIDSSRASNTGAKVDNKTVASTPSSLPQGNRVINEENLPKSSSPQLPPKPSIDLTVAPAGCAVSALATSQVGAWPAATPGLNQPACSDSSLVIPTTIAFCSSINPVSASSCRPGASDSLLVTASGWSPSLTPLLMSGGPAPLAGRPTLLQQAAAQGNVTLLSMLLNEEGLDINYSCEDGHSALYSAAKNGHTDCVRLLLSAEAQVNAADKNGFTPLCAAAAQGHFECVELLISYDANINHAADGGQTPLYLACKNGNKECIKLLLEAGTNRSVKTTDGWTPVHAAVDTGNVDSLKLLMYHRIPAHGNSFNEEESESSVFDLDGGEESPEGISKPVVPADLINHANREGWTAAHIAASKGFKNCLEILCRHGGLEPERRDKCNRTVHDVATDDCKHLLENLNALKIPLRISVGEIEPSNYGSDDLECENTICALNIRKQTSWDDFSKAVSQALTNHFQAISSDGWWSLEDVTCNNTTDSNIGLSARSIRSITLGNVPWSVGQSFAQSPWDFMRKNKAEHITVLLSGPQEGCLSSVTYASMIPLQMMQNYLRLVEQYHNVIFHGPEGSLQDYIVHQLALCLKHRQMAAGFSCEIVRAEVDAGFSKEQLLDLFISSACLIPVKQSPSKKKIIIILENLEKSSLSELLRDFLAPLENRSTESPCTFQKGNGLSECYYFHENCFLMGTIAKACLQGSDLLVQQHFRWVQLRWDGEPMQGLLQRFLRRKVVNKFKGQAPSPCDPVCKIVDWALSVWRQLNSCLARLGTPEALLGPKYFLSCPVVPGHAQVTVKWMSKLWNGVIAPRVQEAILSRASVKRQPGFGQTTAKRHPSQGQQAVVKAALSILLNKAVLHGCPLPRAELDQHTADFKGGSFPLSIVSSYNTCNKKKGESGAWRKVNTSPRRKSGRFSLPTWNKPDLSTEGMKNKTISQLNCNRNASLSKQKSLENDLSLTLNLDQRLSLGSDDEADLVKELQSMCSSKSESDISKIADSRDDLRMFDSSGNNPVLSATINNLRMPVSQKEVSPLSSHQTTECSNSKSKTELGVSRVKSFLPVPRSKVTQCSQNTKRSSSSSNTRQIEINNNSKEVNWNLHKNEHLEKPNK

SEQ ID NO: 186 - protein, 774 aa, Homo sapiens
MLRIHFFSFSFNLSHDVVLSVITEPSRCMTMDEKYVNSIWDLLKNAIQEIQRKNNSGLSFEELYRNAYTMVLHKHGEKLYTGLREVVTEHLINKVREDVLNSLNNNFLQTLNQAWNDHQTAMVMIRDILMYMDRVYVQQNNVENVYNLGLIIFRDQVVRYGCIRDHLRQTLLDMIARERKGEVVDRGAIRNACQMLMILGLEGRSVYEEDFEAPFLEMSAEFFQMESQKFLAENSASVYIKKVEARINEEIERVMHCLDKSTEEPIVKVVERELISKHMKTIVEMENSGLVHMLKNGKTEDLGCMYKLFSRVPNGLKTMCECMSSYLREQGKALVSEEGEGKNPVDYIQGLLDLKSRFDRFLLESFNNDRLFKQTIAGDFEYFLNLNSRSPEYLSLFIDDKLKKGVKGLTEQEVETILDKAMVLFRFMQEKDVFERYYKQHLARRLLTNKSVSDDSEKNMISKLKTECGCQFTSKLEGMFRDMSISNTTMDEFRQHLQATGVSLGGVDLTVRVLTTGYWPTQSATPKCNIPPAPRHAFEIFRRFYLAKHSGRQLTLQHHMGSADLNATFYGPVKKEDGSEVGVGGAQVTGSNTRKHILQVSTFQMTILMLFNNREKYTFEEIQQETDIPERELVRALQSLACGKPTQRVLTKEPKSKEIENGHIFTVNDQFTSKLHRVKIQTVAAKQGESDPERKETRQKVDDDRKHEIEAAIVRIMKSRKKMQHNVLVAEVTQQLKARFLPSPVVIKKRIEGLIEREYLARTPEDRKVYTYVA

SEQ ID NO: 187 - protein, 1782 aa, Homo sapiens
MSRGFWLAEPLAGTGPHPAPVAADSRGCSSVPRRHAPSRLSVSTPSRGPGARMVGELRYREFRVPLGPGLHAYPDELIRQRVGHDGHPEYQIRWLILRRGDEGDGGSGQVDCKAEHILLWMSKDEIYANCHKMLGEDGQVIGPSQESAGEVGALDKSVLEEMETDVKSLIQRALRQLEECVGTIPPAPLLHTVHVLSAYASIEPLTGVFKDPRVLDLLMHMLSSPDYQIRWSAGRMIQALSSHDAGEGQCGEEGKAGEGLGRLRDSQDTVAGASDLIRTRTQILLSLSQQEAIEKHLDFDSRCALLALFAQATLSEHPMSFEGIQLPQVPGRVLFSLVKRYLHVTSLLDQLNDSAAEPGAQNTSAPEELSGERGQLELEFSMAMGTLISELVQAMRWDQASDRPRSSARSPGSIFQPQLADVSPGLPAAQAQPSFRRSRRFRPRSEFASGNTYALYVRDTLQPGMRVRMLDDYEEISAGDEGEFRQSNNGVPPVQVFWESTGRTYWVHWHMLEILGFEEDIEDMVEADEYQGAVASRVLGRALPAWRWRPMTELYAVPYVLPEDEDTEECEHLTLAEWWELLFFIKKLDGPDHQEVLQILQENLDGEILDDEILAELAVPIELAQDLLLTLPQRLNDSALRDLINCHVYKKYGPEALAGNQAYPSLLEAQEDVLLLDAQAQAKDSEDAAKVEAKEPPSQSPNTPLQRLVEGYGPAGKILLDLEQALSSEGTQENKVKPLLLQLQRQPQPFLALMQSLDTPETNRTLHLTVLRILKQLVDFPEALLLPWHEAVDACMACLRSPNTDREVLQELIFFLHRLTSVSRDYAVVLNQLGARDAISKALEKHLGKLELAQELRDMVFKCEKHAHLYRKLITNILGGCIQMVLGQIEDHRRTHQPINIPFFDVFLRYLCQGSSVEVKEDKCWEKVEVSSNPHRASKLTDHNPKTYWESNGSAGSHYITLHMRRGILIRQLTLLVASEDSSYMPARVVVCGGDSTSSLHTELNSVNVMPSASRVILLENLTRFWPIIQIRIKRCQQGGIDTRIRGLEILGPKPTFWPVFREQLCRHTRLFYMVRAQAWSQDMAEDRRSLLHLSSRLNGALRQEQNFADRFLPDDEAAQALGKTCWEALVSPVVQNITSPDEDGISPLGWLLDQYLECQEAVFNPQSRGPAFFSRVRRLTHLLVHVEPCEAPPPVVATPRPKGRNRSHDWSSLATRGLPSSIMRNLTRCWRAVVEKQVNNFLTSSWRDDDFVPRYCEHFNILQNSSSELFGPRAAFLLALQNGCAGALLKLPFLKAAHVSEQFARHIDQQIQGSRIGGAQEMERLAQLQQCLQAVLIFSGLEIATTFEHYYQHYMADRLLGVVSSWLEGAVLEQIGPCFPNRLPQQMLQSLSTSKELQRQFHVYQLQQLDQELLKLEDTEKKIQVGLGASGKEHKSEKEEEAGAAAVVDVAEGEEEEEENEDLYYEGAMPEVSVLVLSRHSWPVASICHTLNPRTCLPSYLRGTLNRYSNFYNKSQSHPALERGSQRRLQWTWLGWAELQFGNQTLHVSTVQMWLLLYLNDLKAVSVESLLAFSGLSADMLNQAIGPLTSSRGPLDLHEQKDIPGGVLKIRDGSKEPRSRWDIVRLIPPQTYLQAEGEDGQNLEKRRNLLNCLIVRILKAHGDEGLHIDQLVCLVLEAWQKGPCPPRGLVSSLGKGSACSSTDVLSCILHLLGKGTLRRHDDRPQVLSYAVPVTVMEPHTESLNPGSSGPNPPLTFHTLQIRSRGVPYASCTATQSFSTFR

SEQ ID NO: 188 - protein, 1516 aa, Homo sapiens
MAANVGSMFQYWKRFDLQQLQRELDATATVLANRQDESEQSRKRLIEQSREFKKNTPEDLRKQVAPLLKSFQGEIDALSKRSKEAEAAFLNVYKRLIDVPDPVPALDLGQQLQLKVQRLHDIETENQKLRETLEEYNKEFAEVKNQEVTIKALKEKIREYEQTLKNQAETIALEKEQKLQNDFAEKERKLQETQMSTTSKLEEAEHKVQSLQTALEKTRTELFDLKTKYDEETTAKADEIEMIMTDLERANQRAEVAQREAETLREQLSSANHSLQLASQIQKAPDVEQAIEVLTRSSLEVELAAKEREIAQLVEDVQRLQASLTKLRENSASQISQLEQQLSAKNSTLKQLEEKLKGQADYEEVKKELNILKSMEFAPSEGAGTQDAAKPLEVLLLEKNRSLQSENAALRISNSDLSGSARRKGKDQPESRRPGSLPAPPPSQLPRNPGEQASNTNGTHQFSPAGLSQDFFSSSLASPSLPLASTGKFALNSLLQRQLMQSFYSKAMQEAGSTSMIFSTGPYSTNSISSQSPLQQSPDVNGMAPSPSQSESAGSVSEGEEMDTAEIARQVKEQLIKHNIGQRIFGHYVLGLSQGSVSEILARPKPWNKLTVRGKEPFHKMKQFLSDEQNILALRSIQGRQRENPGQSLNRLFQEVPKRRNGSEGNITTRIRASETGSDEAIKSILEQAKRELQVQKTAEPAQPSSASGSGNSDDAIRSILQQARREMEAQQAALDPALKQAPLSQSDITILTPKLLSTSPMPTVSSYPPLAISLKKPSAAPEAGASALPNPPALKKEAQDAPGLDPQGAADCAQGVLRQVKNEVGRSGAWKDHWWSAVQPERRNAASSEEAKAEETGGGKEKGSGGSGGGSQPRAERSQLQGPSSSEYWKEWPSAESPYSQSSELSLTGASRSETPQNSPLPSSPIVPMSKPTKPSVPPLTPEQYEVYMYQEVDTIELTRQVKEKLAKNGICQRIFGEKVLGLSQGSVSDMLSRPKPWSKLTQKGREPFIRMQLWLNGELGQGVLPVQGQQQGPVLHSVTSLQDPLQQGCVSSESTPKTSASCSPAPESPMSSSESVKSLTELVQQPCPPIEASKDSKPPEPSDPPASDSQPTTPLPLSGHSALSIQELVAMSPELDTYGITKRVKEVLTDNNLGQRLFGETILGLTQGSVSDLLARPKPWHKLSLKGREPFVRMQLWLNDPNNVEKLMDMKRMEKKAYMKRRHSSVSDSQPCEPPSVGTEYSQGASPQPQHQLKKPRVVLAPEEKEALKRAYQQKPYPSPKTIEDLATQLNLKTSTVINWFHNYRSRIRRELFIEEIQAGSQGQAGASDSPSARSGRAAPSSEGDSCDGVEATEGPGSADTEEPKSQGEAEREEVPRPAEQTEPPPSGTPGPDDARDDDHEGGPVEGPGPLPSPASATATAAPAAPEDAATSAAAAPGEGPAAPSSAPPPSNSSSSSAPRRPSSLQSLFGLPEAAGARDSRDNPLRKKKAANLNSIIHRLEKAASREEPIEWEF

SEQ ID NO: 189 - protein, 387 aa, Homo sapiens
MREPLEAFKLADLDFRKSSLASGWRMASGAFTMDQFPESVTENFEYDDLAEACYIGDIVVFGTVFLSIFYSVIFAIGLVGNLLVVFALTNSKKPKSVTDIYLLNLALSDLLFVATLPFWTHYLINEKGLHNAMCKFTTAFFFIGFFGSIFFITVISIDRYLAIVLAANSMNNRTVQHGVTISLGVWAAAILVAAPQFMFTKQKENECLGDYPEVLQEIWPVLRNVETNFLGFLLPLLIMSYCYFRIIQTLFSCKNHKKAKAIKLILLVVIVFFLFWTPYNVMIFLETLKLYDFFPSCDMRKDLRLALSVTETVAFSHCCLNPLIYAFAGEKFRRYLYHLYGKCLAVLCGRSVHVDFSSSESQRSRHGSVLSSNFTYHTSDGDALLLL

SEQ ID NO: 190 - protein, 415 aa, Homo sapiens
MELRKYGPGRLAGTVIGGAAQSKSQTKSDSITKEFLPGLYTAPSSPFPPSQVSDHQVLNDAEVAALLENFSSSYDYGENESDSCCTSPPCPQDFSLNFDRAFLPALYSLLFLLGLLGNGAVAAVLLSRRTALSSTDTFLLHLAVADTLLVLTLPLWAVDAAVQWVFGSGLCKVAGALFNINFYAGALLLACISFDRYLNIVHATQLYRRGPPARVTLTCLAVWGLCLLFALPDFIFLSAHHDERLNATHCQYNFPQVGRTALRVLQLVAGFLLPLLVMAYCYAHILAVLLVSRGQRRLRAMRLVVVVVVAFALCWTPYHLVVLVDILMDLGALARNCGRESRVDVAKSVTSGLGYMHCCLNPLLYAFVGVKFRERMWMLLLRLGCPNQRGLQRQPSSSRRDSSWSETSEASYSGL

SEQ ID NO: 191 - protein, 1253 aa, Homo sapiens
MAAQVTLEDALSNVDLLEELPLPDQQPCIEPPPSSLLYQPNFNTNFEDRNAFVTGIARYIEQATVHSSMNEMLEEGQEYAVMLYTWRSCSRAIPQVKCNEQPNRVEIYEKTVEVLEPEVTKLMNFMYFQRNAIERFCGEVRRLCHAERRKDFVSEAYLITLGKFINMFAVLDELKNMKCSVKNDHSAYKRAAQFLRKMADPQSIQESQNLSMFLANHNKITQSLQQQLEVISGYEELLADIVNLCVDYYENRMYLTPSEKHMLLKVMGFGLYLMDGSVSNIYKLDAKKRINLSKIDKYFKQLQVVPLFGDMQIELARYIKTSAHYEENKSRWTCTSSGSSPQYNICEQMIQIREDHMRFISELARYSNSEVVTGSGRQEAQKTDAEYRKLFDLALQGLQLLSQWSAHVMEVYSWKLVHPTDKYSNKDCPDSAEEYERATRYNYTSEEKFALVEVIAMIKGLQVLMGRMESVFNHAIRHTVYAALQDFSQVTLREPLRQAIKKKKNVIQSVLQAIRKTVCDWETGHEPFNDPALRGEKDPKSGFDIKVPRRAVGPSSTQLYMVRTMLESLIADKSGSKKTLRSSLEGPTILDIEKFHRESFFYTHLINFSETLQQCCDLSQLWFREFFLELTMGRRIQFPIEMSMPWILTDHILETKEASMMEYVLYSLDLYNDSAHYALTRFNKQFLYDEIEAEVNLCFDQFVYKLADQIFAYYKVMAGSLLLDKRLRSECKNQGATIHLPPSNRYETLLKQRHVQLLGRSIDLNRLITQRVSAAMYKSLELAIGRFESEDLTSIVELDGLLEINRMTHKLLSRYLTLDGFDAMFREANHNVSAPYGRITLHVFWELNYDFLPNYCYNGSTNRFVRTVLPFSQEFQRDKQPNAQPQYLHGSKALNLAYSSIYGSYRNFVGPPHFQVICRLLGYQGIAVVMEELLKVVKSLLQGTILQYVKTLMEVMPKICRLPRHEYGSPGILEFFHHQLKDIVEYAELKTVCFQNLREVGNAILFCLLIEQSLSLEEVCDLLHAAPFQNILPRVHVKEGERLDAKMKRLESKYAPLHLVPLIERLGTPQQIAIAREGDLLTKERLCCGLSMFEVILTRIRSFLDDPIWRGPLPSNGVMHVDECVEFHRLWSAMQFVYCIPVGTHEFTVEQCFGDGLHWAGCMIIVLLGQQRRFAVLDFCYHLLKVQKHDGKDEIIKNVPLKKMVERIRKFQILNDEIITILDKYLKSGDGEGTPVEHVRCFQPPIHQSLASS

SEQ ID NO: 192 - skipped

SEQ ID NO: 193 - protein, 348 aa, Homo sapiens
MSLPRFQRVNFGPYDNYIPVSELSKKSWNQQHFALLFPKPQRPGTKRRSKPSQIRDNTVSIIDEEQLRGDRRQPLWMYRSLMRISERPSVYLAARRQPLKPTRTVEVDSKAAEIGKKGEDKTTQKDTTDSESELKQGKKDSKKGKDIEKGKEEKLDAKKDSKKGKKDAEKGKDSATESEDEKGGAKKDNKKDKKDSNKGKDSATESEGEKGGTEKDSKKGKKDSKKGKDSAIELQAVKADEKKDEDGKKDANKGDESKDAKKDAKEIKKGKKDKKKPSSTDSDSKDDVKKESKKDATKDAKKVAKKDTEKESADSKKDAKKNAKKDAKKDAKKNAKKDEKKDAKKKGK

SEQ ID NO: 194 - protein, 503 aa, Homo sapiens
MALRAKAEVCMAVPWLSLQRAQALGTRAARVPRTVLPFEAMPRRPGNRWLRLLQIWREQGYEDLHLEVHQTFQELGPIFRYDLGGAGMVCVMLPEDVEKLQQVDSLHPHRMSLEPWVAYRQHRGHKCGVFLLNGPEWRFNRLRLNPEVLSPNAVQRFLPMVDAVARDFSQALKKKVLQNARGSLTLDVQPSIFHYTIEASNLALFGERLGLVGHSPSSASLNFLHALEVMFKSTVQLMFMPRSLSRWTSPKVWKEHFEAWDCIFQYGDNCIQKIYQELAFSRPQQYTSIVAELLLNAELSPDAIKANSMELTAGSVDTTVFPLLMTLFELARNPNVQQALRQESLAAAASISEHPQKATTELPLLRAALKETLRLYPVGLFLERVASSDLVLQNYHIPAGTLVRVFLYSLGRNPALFPRPERYNPQRWLDIRGSGRNFYHVPFGFGMRQCLGRRLAEAEMLLLLHHVLKHLQVETLTQEDIKMVYSFILRPSMFPLLTFRAIN

SEQ ID NO: 195 - protein, 555 aa, Homo sapiens
MSTETELQVAVKTSAKKDSRKKGQDRSEATLIKRFKGEGVRYKAKLIGIDEVSAARGDKLCQDSMMKLKGVVAGARSKGEHKQKIFLTISFGGIKIFDEKTGALQHHHAVHEISYIAKDITDHRAFGYVCGKEGNHRFVAIKTAQAAEPVILDLRDLFQLIYELKQREELEKKAQKDKQCEQAVYQTILEEDVEDPVYQYIVFEAGHEPIRDPETEENIYQVPTSQKKEGVYDVPKSQPVSAVTQLELFGDMSTPPDITSPPTPATPGDAFIPSSSQTLPASADVFSSVPFGTAAVPSGYVAMGAVLPSFWGQQPLVQQQMVMGAQPPVAQVMPGAQPIAWGQPGLFPATQQPWPTVAGQFPPAAFMPTQTVMPLPAAMFQGPLTPLATVPGTSDSTRSSPQTDKPRQKMGKETFKDFQMAQPPPVPSRKPDQPSLTCTSEAFSSYFNKVGVAQDTDDCDDFDISQLNLTPVTSTTPSTNSPPTPAPRQSSPSKSSASHASDPTTDDIFEEGFESPSKSEEQEAPDGSQASSNSDPFGEPSGEPSGDNISPQAGS

SEQ ID NO: 196 - protein, 1042 aa, Homo sapiens
MPGIVVFRRRWSVGSDDLVLPAIFLFLLHTTWFVILSVVLFGLVYNPHEACSLNLVDHGRGYLGILLSCMIAEMAIIWLSMRGGILYTEPRDSMQYVLYVRLAILVIEFIYAIVGIVWLTQYYTSCNDLTAKNVTLGMVVCNWVVILSVCITVLCVFDPTGRTFVKLRATKRRQRNLRTYNLRHRLEEGQATSWSRRLKVFLCCTRTKDSQSDAYSEIAYLFAEFFRDLDIVPSDIIAGLVLLRQRQRAKRNAVLDEANNDILAFLSGMPVTRNTKYLDLKNSQEMLRYKEVCYYMLFALAAYGWPMYLMRKPACGLCQLARSCSCCLCPARPRFAPGVTIEEDNCCGCNAIAIRRHFLDENMTAVDIVYTSCHDAVYETPFYVAVDHDKKKVVISIRGTLSPKDALTDLTGDAERLPVEGHHGTWLGHKGMVLSAEYIKKKLEQEMVLSQAFGRDLGRGTKHYGLIVVGHSLGAGTAAILSFLLRPQYPTLKCFAYSPPGGLLSEDAMEYSKEFVTAVVLGKDLVPRIGLSQLEGFRRQLLDVLQRSTKPKWRIIVGATKCIPKSELPEEVEVTTLASTRLWTHPSDLTIALSASTPLYPPGRIIHVVHNHPAEQCCCCEQEEPTYFAIWGDNKAFNEVIISPAMLHEHLPYVVMEGLNKVLENYNKGKTALLSAAKVMVSPTEVDLTPELIFQQQPLPTGPPMPTGLALELPTADHRNSSVRSKSQSEMSLEGFSEGRLLSPVVAAAARQDPVELLLLSTQERLAAELQARRAPLATMESLSDTESLYSFDSRRSSGFRSIRGSPSLHAVLERDEGHLFYIDPAIPEENPSLSSRTELLAADSLSKHSQDTQPLEAALGSGGVTPERPPSAAANDEEEEVGGGGGGPASRGELALHNGRLGDSPSPQVLEFAEFIDSLFNLDSKSSSFQDLYCMVVPESPTSDYAEGPKSPSQQEILLRAQFEPNLVPKPPRLFAGSADPSSGISLSPSFPLSSSGELMDLTPTGLSSQECLAADKIRTSTPTGHGASPAKQDELVISAR

SEQ ID NO: 197 - protein, 1430 aa, Homo sapiens
MTVFRQENVDDYYDTGEELGSGQFAVVKKCREKSTGLQYAAKFIKKRRTKSSRRGVSREDIEREVSILKEIQHPNVITLHEVYENKTDVILILELVAGGELFDFLAEKESLTEEEATEFLKQILNGVYYLHSLQIAHFDLKPENIMLLDRNVPKPRIKIIDFGLAHKIDFGNEFKNIFGTPEFVAPEIVNYEPLGLEADMWSIGVITYILLSGASPFLGDTKQETLANVSAVNYEFEDEYFSNTSALAKDFIRRLLVKDPKKRMTIQDSLQHPWIKPKDTQQALSRKASAVNMEKFKKFAARKKWKQSVRLISLCQRLSRSFLSRSNMSVARSDDTLDEEDSFVMKAIIHAINDDNVPGLQHLLGSLSNYDVNQPNKHGTPPLLIAAGCGNIQILQLLIKRGSRIDVQDKGGSNAVYWAARHGHVDTLKFLSENKCPLDVKDKSGEMALHVAARYGHADVAQLLCSFGSNPNIQDKEEETPLHCAAWHGYYSVAKALCEAGCNVNIKNREGETPLLTASARGYHDIVECLAEHGADLNACDKDGHIALHLAVRRCQMEVIKTLLSQGCFVDYQDRHGNTPLHVACKDGNMPIVVALCEANCNLDISNKYGRTPLHLAANNGILDVVRYLCLMGASVEALTTDGKTAEDLARSEQHEHVAGLLARLRKDTHRGLFIQQLRPTQNLQPRIKLKLFGHSGSGKTTLVESLKCGLLRSFFRRRRPRLSSTNSSRFPPSPLASKPTVSVSINNLYPGCENVSVRSRSMMFEPGLTKGMLEVFVAPTHHPHCSADDQSTKAIDIQNAYLNGVGDFSVWEFSGNPVYFCCYDYFAANDPTSIHVVVFSLEEPYEIQLNQVIFWLSFLKSLVPVEEPIAFGGKLKNPLQVVLVATHADIMNVPRPAGGEFGYDKDTSLLKEIRNRFGNDLHISNKLFVLDAGASGSKDMKVLRNHLQEIRSQIVSVCPPMTHLCEKIISTLPSWRKLNGPNQLMSLQQFVYDVQDQLNPLASEEDLRRIAQQLHSTGEINIMQSETVQDVLLLDPRWLCTNVLGKLLSVETPRALHHYRGRYTVEDIQRLVPDSDVEELLQILDAMDICARDLSSGTMVDVPALIKTDNLHRSWADEEDEVMVYGGVRIVPVEHLTPFPCGIFHKVQVNLCRWIHQQSTEGDADIRLWVNGCKLANRGAELLVLLVNHGQGIEVQVRGLETEKIKCCLLLDSVCSTIENVMATTLPGLLTVKHYLSPQQLREHHEPVMIYQPRDFFRAQTLKETSLTNTMGGYKESFSSIMCFGCHDVYSQASLGMDIHASDLNLLTRRKLSRLLDPPDPLGKDWCLLAMNLGLPDLVAKYNTSNGAPKDFLPSPLHALLREWTTYPESTVGTLMSKLRELGRRDAADFLLKASSVFKINLDGNGQEAYASSCNSGTSYNSISSVVSR

SEQ ID NO: 198 - protein, 280 aa, Homo sapiens
MGRAELLEGKMSTQDPSDLWSRSDGEAELLQDLGWYHGNLTRHAAEALLLSNGCDGSYLLRDSNETTGLYSLSVRAKDSVKHFHVEYTGYSFKFGFNEFSSLKDFVKHFANQPLIGSETGTLMVLKHPYPRKVEEPSIYESVRVHTAMQTGRTEDDLVPTAPSLGTKEGYLTKQGGLVKTWKTRWFTLHRNELKYFKDQMSPEPIRILDLTECSAVQFDYSQERVNCFCLVFPFRTFYLCAKTGVEADEWIKILRWKLSQIRKQLNQGEGTIRSRSFIFK

SEQ ID NO: 199 - protein, 182 aa, Homo sapiens
MELGELLYNKSEYIETASGNKVSRQSVLCGSQNIVLNGKTIVMNDCIIRGDLANVRVGRHCVVKSRSVIRPPFKKFSKGVAFFPLHIGDHVFIEEDCVVNAAQIGSYVHVGKNCVIGRRCVLKDCCKILDNTVLPPETVVPPFTVFSGCPGLFSGELPECTQELMIDVTKSYYQKFLPLTQV

SEQ ID NO: 200 - protein, 259 aa, Homo sapiens
MNKLKSSQKDKVRQFMIFTQSSEKTAVSCLSQNDWKLDVATDNFFQNPELYIRESVKGSLDRKKLEQLYNRYKDPQDENKIGIDGIQQFCDDLALDPASISVLIIAWKFRAATQCEFSKQEFMDGMTELGCDSIEKLKAQIPKMEQELKEPGRFKDFYQFTFNFAKNPGQKGLDLEMAIAYWNLVLNGRFKFLDLWNKFLLEHHKRSIPKDTWNLLLDFSTMIADDMSNYDEEGAWPVLIDDFVEFARPQIAGTKSTTV

SEQ ID NO: 201 - protein, 441 aa, Homo sapiens
MKTLPLHSHCTEMQRLLPKLEMLTLGSSFCSLQGEFCQAMDSFTTVSHVGMCEETDASFNVFSPKFQFDRSHCQSLRFHQNMELDFGHFDERDKTSRNMRGSRMNGLPSPTHSAHCSFYRTRTLQALSNEKKAKKVRFYRNGDRYFKGIVYAVSSDRFRSFDALLADLTRSLSDNINLPQGVRYIYTIDGSRKIGSMDELEEGESYVCSSDNFFKKVEYTKNVNPNWSVNVKTSANMKAPQSLASSNSAQARENKDFVRPKLVTIIRSGVKPRKAVRVLLNKKTAHSFEQVLTDITEAIKLETGVVKKLYTLDGKQVTCLHDFFGDDDVFIACGPEKFRYAQDDFSLDENECRVMKGNPSATAGPKASPTPQKTSAKSPGPMRRSKSPADSANGTSSSQLSTPKSKQSPISTPTSPGSLRKHKDLYLPLSLDDSDSLGDSM

SEQ ID NO: 202 - protein, 480 aa, Homo sapiens
MNASEFRRRGKEMVDYVANYMEGIEGRQVYPDVEPGYLRPLIPAAAPQEPDTFEDIINDVEKIIMPGVTHWHSPYFFAYFPTASSYPAMLADMLCGAIGCIGFSWAASPACTELETVMMDWLGKMLELPKAFLNEKAGEGGGVIQGSASEATLVALLAARTKVIHRLQAASPELTQAAIMEKLVAYSSDQAHSSVERAGLIGGVKLKAIPSDGNFAMRASALQEALERDKAAGLIPFFMVATLGTTTCCSFDNLLEVGPICNKEDIWLHVDAAYAGSAFICPEFRHLLNGVEFADSFNFNPHKWLLVNFDCSAMWVKKRTDLTGAFRLDPTYLKHSHQDSGLITDYRHWQIPLGRRFRSLKMWFVFRMYGVKGLQAYIRKHVQLSHEFESLVRQDPRFEICVEVILGLVCFRLKGSNKVNEALLQRINSAKKIHLVPCHLRDKFVLRFAICSRTVESAHVQRAWEHIKELAADVLRAERE

SEQ ID NO: 203 - protein, 970 aa, Homo sapiens
MANETQKVGAIHFPFPFTPYSIQEDFMAELYRVLEAGKIGIFESPTGTGKSLSLICGALSWLRDFEQKKREEEARLLETGTGPLHDEKDESLCLSSSCEGAAGTPRPAGEPAWVTQFVQKKEERDLVDRLKAEQARRKQREERLQQLQHRVQLKYAAKRLRQEEEERENLLRLSREMLETGPEAERLEQLESGEEELVLAEYESDEEKKVASRVDEDEDDLEEEHITKIYYCSRTHSQLAQFVHEVKKSPFGKDVRLVSLGSRQNLCVNEDVKSLGSVQLINDRCVDMQRSRHEKKKGAEEEKPKRRRQEKQAACPFYNHEQMGLLRDEALAEVKDMEQLLALGKEARACPYYGSRLAIPAAQLVVLPYQMLLHAATRQAAGIRLQDQVVIIDEAHNLIDTITGMHSVEVSGSQLCQAHSQLLQYVERYGKRLKAKNLMYLKQILYLLEKFVAVLGGNIKQNPNTQSLSQTGTELKTINDFLFQSQIDNINLFKVQRYCEKSMISRKLFGFTERYGAVFSSREQPKLAGFQQFLQSLQPRTTEALAAPADESQASTLRPASPLMHIQGFLAALTTANQDGRVILSRQGSLSQSTLKFLLLNPAVHFAQVVKECRAVVIAGGTMQPVSDFRQQLLACAGVEAERVVEFSCGHVIPPDNILPLVICSGISNQPLEFTFQKRELPQMMDEVGRILCNLCGVVPGGVVCFFPSYEYLRQVHAHWEKGGLLGRLAARKKIFQEPKSAHQVEQVLLAYSRCIQACGQERGQVTGALLLSVVGGKMSEGINFSDNLGRCVVMVGMPFPNIRSAELQEKMAYLDQTLSPRPGTPREGSGGEPVHEGRQPVHRQGHQAPEGFCQRSAPGPAICPAPCPGQAAGLDPSPCGGQSYLWPRHCCCAEVSPGEVGLFLMGNHTTAWRRALPLSCPLETVFVVGVVCGDPVTKVKPRRRVWSPECCQDPGTGVSSRRRKWGNPE

SEQ ID NO: 204 - protein, 662 aa, Homo sapiens
MSHVAVENALGLDQQFAGLDLNSSDNQSGGSTASKGRYIPPHLRNREATKGFYDKDSSGWSSSKDKDAYSSFGSRSDSRGKSSFFSDRGSGSRGRFDDRGRSDYDGIGSRGDRSGFGKFERGGNSRWCDKSDEDDWSKPLPPSERLEQELFSGGNTGINFEKYDDIPVEATGNNCPPHIESFSDVEMGEIIMGNIELTRYTRPTPVQKHAIPIIKEKRDLMACAQTGSGKTAAFLLPILSQIYSDGPGEALRAMKENGRYGRRKQYPISLVLAPTRELAVQIYEEARKFSYRSRVRPCVVYGGADIGQQIRDLERGCHLLVATPGRLVDMMERGKIGLDFCKYLVLDEADRMLDMGFEPQIRRIVEQDTMPPKGVRHTMMFSATFPKEIQMLARDFLDEYIFLAVGRVGSTSENITQKVVWVEESDKRSFLLDLLNATGKDSLTLVFVETKKGADSLEDFLYHEGYACTSIHGDRSQRDREEALHQFRSGKSPILVATAVAARGLDISNVKHVINFDLPSDIEEYVHRIGRTGRVGNLGLATSFFNERNINITKDLLDLLVEAKQEVPSWLENMAYEHHYKGSSRGRSKSSRFSGGFGARDYRQSSGASSSSFSSSRASSSRSGGGGHGSSRGFGGGGYGGFYNSDGYGGNYNSQGVDWWGN

SEQ ID NO: 205 - protein, 631 aa, Homo sapiens
MSHWAPEWKRAEANPRDLGASWDVRGSRGSGWSGPFGHQGPRAAGSREPPLCFKIKNNMVGVVIGYSGSKIKDLQHSTNTKIQIINGESEAKVRIFGNREMKAKAKAAIETLIRKQESYNSESSVDNAASQTPIGRNLGRNDIVGEAEPLSNWDRIRAAVVECEKRKWADLPPVKKNFYIESKATSCMSEMQVINWRKENFNITCDDLKSGEKRLIPKPTCRFKDAFQQYPDLLKSIIRVGIVKPTPIQSQAWPIILQGIDLIVVAQTGTGKTLSYLMPGFIHLDSQPISREQRNGPGMLVLTPTRELALHVEAECSKYSYKGLKSICIYGGRNRNGQIEDISKGVDIIIATPGRLNDLQMNNSVNLRSITYLVIDEADKMLDMEFEPQIRKILLDVRPDRQTVMTSATWPDTVRQLALSYLKDPMIVYVGNLNLVAVNTVKQNIIVTTEKEKRALTQEFVENMSPNDKVIMFVSQKHIADDLSSDFNIQGISAESLHGNSEQSDQERAVEDFKSGNIKILITTDIVSRGLDLNDVTHVYNYDFPRNIDVYVHRVGYIGRTGKTGTSVTLITQRDSKMAGELIKILDRANQSVPEDLVVMAEQYKLNQQKRHRETRSRKPGQRRKEFYFLS

SEQ ID NO: 206 - protein, 565 aa, Homo sapiens
MEDSDSAAKQLGLAEAAAVAAAAAVAAAAAAAAGGEAEEPVLSRDEDSEEDADSEAERETPRVTAVAVMAAEPGHMDMGAEALPGPDEAAAAAAFAEVTTVTVANVGAAADNVFTTSVANAASISGHVLSGRTALQIGDSLNTEKATLIVVHTDGSIVETTGLKGPAAPLTPGPQSPPTPLAPGQEKGGTKYNWDPSVYDSELPVRCRNISGTLYKNRLGSGGRGRCIKQGENWYSPTEFEAMAGRASSKDWKRSIRYAGRPLQCLIQDGILNPHAASCTCAACCDDMTLSGPVRLFVPYKRRKKENELPTTPVKKDSPKNITLLPATAATTFTVTPSGQITTSGALTFDRASTVEATAVISESPAQGDVFAGATVQEASVQPPCRASHPEPHYPGYQDSCQIAPFPEAALPTSHPKIVLTSLPALAVPPPTPTKAAPPALVNGLELSEPRSWLYLEEMVNSLLNTAQQLKTLFEQAKHASTYREAATNQAKIHADAERKEQSCVNCGREAMSECTGCHKVNYCSTFCQRKDWKDHQHICGQSAAVTVQADEVHVAESVMEKVTV

SEQ ID NO: 207 - skipped

SEQ ID NO: 208 - protein, 198 aa, Homo sapiens
MAADISESSGADCKGDPRNSAKLDADYPLRVLYCGVCSLPTEYCEYMPDVAKCRQWLEKNFPNEFAKLTVENSPKQEAGISEGQGTAGEEEEKKKQKRGGRGQIKQKKKTVPQKVTIAKIPRAKKKYVTRVCGLATFEIDLKEAQRFFAQKFSCGASVTGEDEIIIQGDFTDDIIDVIQEKWPEVDDDSIEDLGEVKK

SEQ ID NO: 209 - protein, 1603 aa, Homo sapiens
MRTTKVYKLVIHKKGFGGSDDELVVNPKVFPHIKLGDIVEIAHPNDEYSPLLLQVKSLKEDLQKETISVDQTVTQVFRLRPYQDVYVNVVDPKDVTLDLVELTFKDQYIGRGDMWRLKKSLVSTCAYITQKVEFAGIRAQAGELWVKNEKVMCGYISEDTRVVFRSTSAMVYIFIQMSCEMWDFDIYGDLYFEKAVNGFLADLFTKWKEKNCSHEVTVVLFSRTFYDAKSVDEFPEINRASIRQDHKGRFYEDFYKVVVQNERREEWTSLLVTIKKLFIQYPVLVRLEQAEGFPQGDNSTSAQGNYLEAINLSFNVFDKHYINRNFDRTGQMSVVITPGVGVFEVDRLLMILTKQRMIDNGIGVDLVCMGEQPLHAVPLFKLHNRSAPRDSRLGDDYNIPHWINHSFYTSKSQLFCNSFTPRIKLAGKKPASEKAKNGRDTSLGSPKESENALPIQVDYDAYDAQVFRLPGPSRAQCLTTCRSVRERESHSRKSASSCDVSSSPSLPSRTLPTEEVRSQASDDSSLGKSANILMIPHPHLHQYEVSSSLGYTSTRDVLENMMEPPQRDSSAPGRFHVGSAESMLHVRPGGYTPQRALINPFAPSRMPMKLTSNRRRWMHTFPVGPSGEAIQIHHQTRQNMAELQGSGQRDPTHSSAELLELAYHEAAGRHSNSRQPGDGMSFLNFSGTEELSVGLLSNSGAGMNPRTQNKDSLEDSVSTSPDPILTLSAPPVVPGFCCTVGVDWKSLTTPACLPLTTDYFPDRQGLQNDYTEGCYDLLPEADIDRRDEDGVQMTAQQVFEEFICQRLMQGYQIIVQPKTQKPNPAVPPPLSSSPLYSRGLVSRNRPEEEDQYWLSMGRTFHKVTLKDKMITVTRYLPKYPYESAQIHYTYSLCPSHSDSEFVSCWVEFSHERLEEYKWNYLDQYICSAGSEDFSLIESLKFWRTRFLLLPACVTATKRITEGEAHCDIYGDRPRADEDEWQLLDGFVRFVEGLNRIRRRHRSDRMMRKGTAMKGLQMTGPISTHSLESTAPPVGKKGTSALSALLEMEASQKCLGEQQAAVHGGKSSAQSAESSSVAMTPTYMDSPRKDGAFFMEFVRSPRTASSAFYPQVSVDQTATPMLDGTSLGICTGQSMDRGNSQTFGNSQNIGEQGYSSTNSSDSSSQQLVASSLTSSSTLTEILEAMKHPSTGVQLLSEQKGLSPYCFISAEVVHWLVNHVEGIQTQAMAIDIMQKMLEEQLITHASGEAWRTFIYGFYFYKIVTDKEPDRVAMQQPATTWHTAGVDDFASFQRKWFEVAFVAEELVHSEIPAFLLPWLPSRPASYASRHSSFSRSFGGRSQAAALLAATVPEQRTVTLDVDVNNRTDRLEWCSCYYHGNFSLNAAFEIKLHWMAVTAAVLFEMVQGWHRKATSCGFLLVPVLEGPFALPSYLYGDPLRAQLFIPLNISCLLKEGSEHLFDSFEPETYWDRMHLFQEAIAHRFGFVQDKYSASAFNFPAENKPQYIHVTGTVFLQLPYSKRKFSGQQRRRRNSTSSTNQNMFCEERVGYNWAYNTMLTKTWRSSATGDEKFADRLLKDFTDFCINRDNRLVTFWTSCLEKMHASAP

SEQ ID NO: 210 - protein, 1271 aa, Homo sapiens
MDRGAAAAQGTAPPQDGEQPAESPEPPPPWPPPPPPPAPPPAPPLLSEASPEPIPEPCPELAPGPCPEATSESATELYTEPTPEPATEPASEPAPEPATEPAPEPATEPAPEPAPEPATESAPEPTPEPALESVPEPAPELTPEVAPELAPEPTPEPVTELAPEFCPEAAPEFRPSPAPCLLQCPVDTRERGLKTSPSPSPSPSPRTPMSWSRIKKILKEGPMLKNCNSFKRWKLRYFLVQGQKLYFAHHPAFAHFETIDLSQATVAESSCRNLCHSFCVITPQRKITLAAPNRKDMEEWINIIKTIQQGEIYKIPAAENNPFLVGMHCWYSSYSHRTQHCNVCRESIPALSRDAIICEVCKVKSHRLCALRASKDCKWNTLSITDDLLLPADEVNMPHQWVEGNMPVSSQCAVCHESCGSYQRLQDFRCLWCNSTVHDDCRRRFSKECCFRSHRSSVIPPTALSDPKGDGQLVVSSDFWNLDWSSACSCPLLIFINSKSGDHQGIVFLRKFKQYLNPSQVFDLLKGGPEAGLSMFKNFARFRILVCGGDGSVSWVLSLIDAFGLHEKCQLAVIPLGTGNDLARVLGWGAFWNKSKSPLDILNRVEQASVRILDRWSVMIRETPRQTPLLKGQVEMDVPRFEAAAIQHLESAATELNKILKAKYPTEMIIATRFLCSAVEDFVVDIVKAWGQIKQNNTAIVSVILKSDLMYDRLSVLIDVLAEEAAATSAEKSATEYADSSKADRKPFIPQIDHIAKCKLELATKAQSLQKSLKLIIFQVEQALDEESRQTISVKNFSSTFFLEDDPEDINQTSPRRRSRRGTLSSISSLKSEDLDNLNLDHLHFTPESIRFKEKCVMNNYFGIGLDAKISLDFNTRRDEHPGQYNSRLKNKMWYGLLGTKELLQRSYRKLEERVHLECDGETISLPNLQGIVVLNITSYAGGINFWGSNTATTEYEAPAIDDGKLEVVAIFGSVQMAMSRIINLHHHRIAQCHEVMITIDGEEGIPVQVDGEAWIQRPGLIKIRYKNAAQMLTRDRDFENSMKMWEYKHTEIQAAPQPQLDFQDSQESLSDEEYAQMQHLARLAENLISKLNDLSKIHQHVSVLMGSVNASANILNDIFYGQDSGNEMGAASCIPIETLSRNDAVDVTFSLKGLYDDTTAFLDEKLLRSAEDETALQSALDAMNKEFKKLSEIDWMNPIFVPEEKSSDTDSRSLRLKIKFPKLGKKKVEEERKPKSGQSVQSFIGNLWHRRHREDEAEGDDPLTPSRSQL

SEQ ID NO: 211 - protein, 1117 aa, Homo sapiens
METFFRRHFRGKVPGPGEGQQRPSSVGLPTGKARRRSPAGQASSSLAQRRRSSAQLQGCLLSCGVRAQGSSRRRSSTVPPSCNPRFIVDKVLTPQPTTVGAQLLGAPLLLTGLVGMNEEEGVQEDVVAEASSAIQPGTKTPGPPPPRGAQPLLPLPRYLRRASSHLLPADAVYDHALWGLHGYYRRLSQRRPSGQHPGPGGRRASGTTAGTMLPTRVRPLSRRRQVALRRKAAGPQAWSALLAKAITKSGLQHLAPPPPTPGAPCSESERQIRSTVDWSESATYGEHIWFETNVSGDFCYVGEQYCVARMLKSVSRRKCAACKIVVHTPCIEQLEKINFRCKPSFRESGSRNVREPTFVRHHWVHRRRQDGKCRHCGKGFQQKFTFHSKEIVAISCSWCKQAYHSKVSCFMLQQIEEPCSLGVHAAVVIPPTWILRARRPQNTLKASKKKKRASFKRKSSKKGPEEGRWRPFIIRPTPSPLMKPLLVFVNPKSGGNQGAKIIQSFLWYLNPRQVFDLSQGGPKEALEMYRKVHNLRILACGGDGTVGWILSTLDQLRLKPPPPVAILPLGTGNDLARTLNWGGGYTDEPVSKILSHVEEGNVVQLDRWDLHAEPNPEAGPEDRDEGATDRLPLDVFNNYFSLGFDAHVTLEFHESREANPEKFNSRFRNKMFYAGTAFSDFLMGSSKDLAKHIRVVCDGMDLTPKIQDLKPQCVVFLNIPRYCAGTMPWGHPGEHHDFEPQRHDDGYLEVIGFTMTSLAALQVGGHGERLTQCREVVLTTSKAIPVQVDGEPCKLAASRIRIALRNQATMVQKAKRRSAAPLHSDQQPVPEQLRIQVSRVSMHDYEALHYDKEQLKEASVPLGTVVVPGDSDLELCRAHIERLQQEPDGAGAKSPTCQKLSPKWCFLDATTASRFYRIDRAQEHLNYVTEIAQDEIYILDPELLGASARPDLPTPTSPLPTSPCSPTPRSLQGDAAPPQGEELIEAAKRNDFCKLQELHRAGGDLMHRDEQSRTLLHHAVSTGSKDVVRYLLDHAPPEILDAVEENGETCLHQAAALGQRTICHYIVEAGASLMKTDQQGDTPRQRAEKAQDTELAAYLENRQHYQMIQREDQETAV

SEQ ID NO: 212 - protein, 475 aa, Homo sapiens
MAAKSQPNIPKAKSLDGVTNDRTASQGQWGRAWEVDWFSLASVIFLLLFAPFIVYYFIMACDQYSCALTGPVVDIVTGHARLSDIWAKTPPITRKAAQLYTLWVTFQVLLYTSLPDFCHKFLPGYVGGIQEGAVTPAGVVNKYQINGLQAWLLTHLLWFANAHLLSWFSPTIIFDNWIPLLWCANILGYAVSTFAMVKGYFFPTSARDCKFTGNFFYNYMMGIEFNPRIGKWFDFKLFFNGRPGIVAWTLINLSFAAKQRELHSHVTNAMVLVNVLQAIYVIDFFWNETWYLKTIDICHDHFGWYLGWGDCVWLPYLYTLQGLYLVYHPVQLSTPHAVGVLLLGLVGYYIFRVANHQKDLFRRTDGRCLIWGRKPKVIECSYTSADGQRHHSKLLVSGFWGVARHFNYVGDLMGSLAYCLACGGGHLLPYFYIIYMAILLTHRCLRDEHRCASKYGRDWERYTAAVPYRLLPGIF

SEQ ID NO: 213 - protein, 1193 aa, Homo sapiens
MERHQPRLHHPAQGSAAGTPYPSSASLRGCRESKMPRRKGPQHPPPPSGPEEPGEKRPKFHLNIRTLTDDMLDKFASIRIPGSKKERPPLPNLKTAFASSDCSAAPLEMMENFPKPLSENELLELFEKMMEDMNLNEDKKAPLREKDFSIKKEMVMQYINTASKTGSLKRSRQISPQEFIHELKMGSADERLVTCLESLRVSLTSNPVSWVESFGHEGLGLLLDILEKLISGKIQEKVVKKNQHKVIQCLKALMNTQYGLERIMSEERSLSLLAKAVDPRHPNMMTDVVKLLSAVCIVGEESILEEVLEALTSAGEEKKIDRFFCIVEGLRHNSVQLQVACMQLINALVTSPDDLDFRLHIRNEFMRCGLKEILPNLKCIKNDGLDIQLKVFDEHKEEDLFELSHRLEDIRAELDEAYDVYNMVWSTVKETRAEGYFISILQHLLLIRNDYFIRQQYFKLIDECVSQIVLHRDGMDPDFTYRKRLDLDLTQFVDICIDQAKLEEFEEKASELYKKFEKEFTDHQETQAELQKKEAKINELQAELQAFKSQFGALPADCNIPLPPSKEGGTGHSALPPPPPLPSGGGVPPPPPPPPPPPLPGMRMPFSGPVPPPPPLGFLGGQNSPPLPILPFGLKPKKEFKPEISMRRLNWLKIRPHEMTENCFWIKVNENKYENVDLLCKLENTFCCQQKERREEEDIEEKKSIKKKIKELKFLDSKIAQNLSIFLSSFRVPYEEIRMMILEVDETRLAESMIQNLIKHLPDQEQLNSLSQFKSEYSNLCEPEQFVVVMSNVKRLRPRLSAILFKLQFEEQVNNIKPDIMAVSTACEEIKKSKSFSKLLELVLLMGNYMNAGSRNAQTFGFNLSSLCKLKDTKSADQKTTLLHFLVEICEEKYPDILNFVDDLEPLDKASKVSVETLEKNLRQMGRQLQQLEKELETFPPPEDLHDKFVTKMSRFVISAKEQYETLSKLHENMEKLYQSIIGYYAIDVKKVSVEDFLTDLNNFRTTFMQAIKENIKKREAEEKEKRVRIAKELAERERLERQQKKKRLLEMKTEGDETGVMDNLLEALQSGAAFRDRRKRTPMPKDVRQSLSPMSQRPVLKVCNHENQKVQLTEGSRSHYNINCNSTRTPVAKELNYNLDTHTSTGRIKAAEKKEACNVESNRKKETELLGSFSKNESVPEVEALLARLRAL

SEQ ID NO: 214 - protein, 1571 aa, Homo sapiens
MADRGCPLEAAPLPAEVRESLAELELELSEGDITQKGYEKKRAKLLARYIPLIQGIDPSLQAENRIPGPSQTTAAAPKQQKSRPTASRDERFRSDVHTEAVQAALAKYKERKMPMPSKRRSVLVHSSVETYTPPDTSSASEDEGSLRRPGRLTSTPLQSHSSVEPWLDRVIQGSSTSSSASSTSSHPGGRPTTAPSAAATPGAAATTALAGLEAHTHIDLHSAPPDVTTGLVEHSYFERPQVASVRSVPRGCSGSMLETADGVPVNSRVSSKIQQLLNTLKRPKRPPLKEFFVDDFEELLEVQQPDPNQPKPEGSETSVLRGEPLTAGVPRPPSLLATLQRWGTTQPKSPCLTALDTTGKAVYTLTYGKLWSRSLKLAYTLLNKLTSKNEPLLKPGDRVALVFPNSDPVMFMVAFYGCLLAELVPVPIEVPLTRKDAGSQQVGFLLGSCGVFLALTTDACQKGLPKAQTGEVAAFKGWPPLSWLVIDGKHLAKPPKDWHPLAQDTGTGTAYIEYKTSKEGSTVGVTVSHASLLAQCRALTQACGYSEAETLTNVLDFKRDAGLWHGVLTSVMNRMHVVSVPYALMKANPLSWIQKVCFYKARAALVKSRDMHWSLLAQRGQRDVSLSSLRMLIVADGANPWSISSCDAFLNVFQSRGLRPEVICPCASSPEALTVAIRRPPDLGGPPPRKAVLSMNGLSYGVIRVDTEEKLSVLTVQDVGQVMPGANVCVVKLEGTPYLCKTDEVGEICVSSSATGTAYYGLLGITKNVFEAVPVTTGGAPIFDRPFTRTGLLGFIGPDNLVFIVGKLDGLMVTGVRRHNADDVVATALAVEPMKFVYRGRIAVFSVTVLHDDRIVLVAEQRPDASEEDSFQWMSRVLQAIDSIHQVGVYCLALVPANTLPKAPLGGIHISETKQRFLEGTLHPCNVLMCPHTCVTNLPKPRQKQPEVGPASMIVGNLVAGKRIAQASGRELAHLEDSDQARKFLFLADVLQWRAHTTPDHPLFLLLNAKGTVTSTATCVQLHKRAERVAAALMEKGRLSVGDHVALVYPPGVDLIAAFYGCLYCGCVPVTVRPPHPQNLGTTLPTVKMIVEVSKSACVLTTQAVTRLLRSKEAAAAVDIRTWPTILDTDDIPKKKIASVFRPPSPDVLAYLDFSVSTTGILAGVKMSHAATSALCRSIKLQCELYPSRQIAICLDPYCGLGFALWCLCSVYSGHQSVLVPPLELESNVSLWLSAVSQYKARVTFCSYSVMEMCTKGLGAQTGVLRMKGVNLSCVRTCMVVAEERPRIALTQSFSKLFKDLGLPARAVSTTFGCRVNVAICLQGTAGPDPTTVYVDMRALRHDRVRLVERGSPHSLPLMESGKILPGVKVIIAHTETKGPLGDSHLGEIWVSSPHNATGYYTVYGEEALHADHFSARLSFGDTQTIWARTGYLGFLRRTELTDASGGRHDALYVVGSLDETLELRGMRYHPIDIETSVIRAHRSIAECAVFTWTNLLVVVVELDGLEQDALDLVALVTNVVLEEHYLVVGVVVIVDPGVIPINSRGEKQRMHLRDGFLADQLDPIYVAYNM

SEQ ID NO: 215 - protein, 886 aa, Homo sapiens
MPGGGPQGAPAAAGGGGVSHRAGSRDCLPPAACFRRRRLARRPGYMRSSTGPGIGFLSPAVGTLFRFPGGVSGEESHHSESRARQCGLDSRGLLVRSPVSKSAAAPTVTSVRGTSAHFGIQLRGGTRLPDRLSWPCGPGSAGWQQEFAAMDSSETLDASWEAACSDGARRVRAAGSLPSAELSSNSCSPGCGPEVPPTPPGSHSAFTSSFSFIRLSLGSAGERGEAEGCPPSREAESHCQSPQEMGAKAASLDGPHEDPRCLSRPFSLLATRVSADLAQAARNSSRPERDMHSLPDMDPGSSSSLDPSLAGCGGDGSSGSGDAHSWDTLLRKWEPVLRDCLLRNRRQMEVISLRLKLQKLQEDAVENDDYDKVETGFHYVGQAGLELLTSSNPPASASQSAGITAETLQQRLEDLEQEKISLHFQLPSRQPALSSFLGHLAAQVQAALRRGATQQASGDDTHTPLRMEPRLLEPTAQDSLHVSITRRDWLLQEKQQLQKEIEALQARMFVLEAKDQQLRREIEEQEQQLQWQGCDLTPLVGQLSLGQLQEVSKALQDTLASAGQIPFHAEPPETIRSLQERIKSLNLSLKEITTKVCMSEKFCSTLRKKVNDIETQLPALLEAKMHAISGNHFWTAKDLTEEIRSLTSEREGLEGLLSKLLVLSSRNVKKLGSVKEDYNRLRREVEHQETAYETSVKENTMKYMETLKNKLCSCKCPLLGKVWEADLEACRLLIQSLQLQEARGSLSVEDERQMDDLEGAAPPIPPRLHSEDKRKTPLKVLEEWKTHLIPSLHCAGGEQKEESYILSAELGEKCEDIGKKLLYLEDQLHTAIHSHDEDLIQSLRRELQMVKETLQAMILQLQPAKEAGEREAAASCMTAGVHEAQA

SEQ ID NO: 216 - protein, 683 aa, Homo sapiens
MLACLTRGNLLDVLQEGFNEQQLQAYVAWVNAQLKKRPAVKPVQDLRQDLRDGVILAYLIEIVAGEKLSGVQLSPGNQQEMKNNVEKVLQFVASKKIRMHQTSAKDIVDGNLKSIMRLVLALAAHFKPGSSRTVNQGRDSRAPLQSHRPHCATAVAQGAAAALADVCHDMSRSGRDVFRYRQRNSSMDEEIENPYWSVRALVQQYEGQQRSPSESSCSSLTSPSPIHSAKSESIITQSEEKADFVIIPAEGIENRTEGTDSPLSRDWRPGSPGTYLETSWEEQLLEQQEYLEKEMEEAKKMISGLQALLLNGSLPEDEQERPLALCEPGVNPEEQLIIIQSRLDQSMEENQDLKKELLKCKQEARNLQGIKDALQQRLTQQDTSVLQLKQELLRANMDKDELHNQNVDLQRKLDERNRLLGEYKKELGQKDRLLQQHQAKLEEALRKLSDVSYHQVDLERELEHKDVLLAHCMKREADEATNYNSHNSQSNGFLLPTAGKGATSVSNRGTSDLQLVRDALRSLRNSFSGHDPQHHTIDSLEQGISSLMERLHVMETQKKQERKVRVKSPRTQVGSEYRESWPPNSKLPHSQSSPTVSSTCTKVLYFTDRSLTPFMVNIPKRLEEVTLKDFKAAIDREGNHRYHFKALDPEFGTVKEEIFHDDDAIPGWEGKIVAWVEEDHGEN

SEQ ID NO: 217 - protein, 926 aa, Homo sapiens
MPVRKQDTQRALHLLEEYRSKLSQTEDRQLRSSIERVINIFQSNLFQALIDIQEFYEVTLLDNPKCIDRSKPSEPIQPVNTWEISSLPSSTVTSETLPSSLSPSVEKYRYQDEDTPPQEHISPQITNEVIGPELVHVSEKNLSEIENVHGFVSHSHISPIKPTEAVLPSPPTVPVIPVLPVPAENTVILPTIPQANPPPVLVNTDSLETPTYVNGTDADYEYEEITLERGNSGLGFSIAGGTDNPHIGDDSSIFITKIITGGAAAQDGRLRVNDCILRVNEVDVRDVTHSKAVEALKEAGSIVRLYVKRRKPVSEKIMEIKLIKGPKGLGFSIAGGVGNQHIPGDNSIYVTKIIEGGAAHKDGKLQIGDKLLAVNNVCLEEVTHEEAVTALKNTSDFVYLKVAKPTSMYMNDGYAPPDITNSSSQPVDNHVSPSSFLGQTPASPARYSPVSKAVLGDDEITREPRKVVLHRGSTGLGFNIVGGEDGEGIFISFILAGGPADLSGELRKGDRIISVNSVDLRAASHEQAAAALKNAGQAVTIVAQYRPEEYSRFEAKIHDLREQMMNSSISSGSGSLRTSQKRSLYVRALFDYDKTKDSGLPSQGLNFKFGDILHVINASDDEWWQARQVTPDGESDEVGVIPSKRRVEKKERARLKTVKFNSKTRDKGQSFNDKRKKNLFSRKFPFYKNKDQSEQETSDADQHVTSNASDSESSYRGQEEYVLSYEPVNQQEVNYTRPVIILGPMKDRINDDLISEFPDKFGSCVPHTTRPKRDYEVDGRDYHFVTSREQMEKDIQEHKFIEAGQYNNHLYGTSVQSVREVAEKGKHCILDVSGNAIKRLQIAQLYPISIFIKPKSMENIMEMNKRLTEEQARKTFERAMKLEQEFTEHFTAIVQGDTLEDIYNQVKQIIEEQSGSYIWVPAKEKL

SEQ ID NO: 218 - protein, 767 aa, Homo sapiens
MSQRPRAPRSALWLLAPPLLRWAPPLLTVLHSDLFQALLDILDYYEASLSESQKYRYQDEDTPPLEHSPAHLPNQANSPPVIVNTDTLEAPGYELQVNGTEGEMEYEEITLERGNSGLGFSIAGGTDNPHIGDDPSIFITKIIPGGAAAQDGRLRVNDSILFVNEVDVREVTHSAAVEALKEAGSIVRLYVMRRKPPAEKVMEIKLIKGPKGLGFSIAGGVGNQHIPGDNSIYVTKIIEGGAAHKDGRLQIGDKILAVNSVGLEDVMHEDAVAALKNTYDVVYLKVAKPSNAYLSDSYAPPDITTSYSQHLDNEISHSSYLGTDYPTAMTPTSPRRYSPVAKDLLGEEDIPREPRRIVIHRGSTGLGFNIVGGEDGEGIFISFILAGGPADLSGELRKGDQILSVNGVDLRNASHEQAAIALKNAGQTVTIIAQYKPEEYSRFEAKIHDLREQLMNSSLGSGTASLRSNPKRGFYIRALFDYDKTKDCGFLSQALSFRFGDVLHVIDASDEEWWQARRVHSDSETDDIGFIPSKRRVERREWSRLKAKDWGSSSGSQGREDSVLSYETVTQMEVHYARPIIILGPTKDRANDDLLSEFPDKFGSCVPHTTRPKREYEIDGRDYHFVSSREKMEKDIQAHKFIEAGQYNSHLYGTSVQSVREVAEQGKHCILDVSANAVRRLQAAHLHPIAIFIRPRSLENVLEINKRITEEQARKAFDRATKLEQEFTECFSAIVEGDSFEEIYHKVKRVIEDLSGPYIWVPARERL

SEQ ID NO: 219 - protein, 929 aa, Homo sapiens
MKGLSGSRSHHHGVTCDSACDSLSHHSDRKPYLLSPVEHHPADHPYYTQRNSFQAECVGPFSDPLASSTFPRRHYTSQQELKDECALVPRTLATKANRIPANLLDQFERQLPLSRDGYHTLQYKRTAVEHRSDSPGRIRHLVHSVQKLFTKSHSLEGPSKGSVNGGKASPDEAQAARYGKRSKSKERRAEPKARPSTSPGWWSSDDNLDGDMCIYHAPSGVMTMGRCPDRSASQYFLEAYNTISEQAVKASRSNNDVKCSTCANLPVSLDTPLLKKSAWSSTLTVSRAREVYQKASVNMDQAMVKSESCQQERSCQYLQVPQDEWTGYTPRGKDDEIPCRRMRSGSYIKAMGDEDSGDSDTSPKPSPKVAARRESYLKATQPSLTELTTLKISNEHSPKLQIRSHSYLRAVSEVSINRSLDSLDPAGLLTSPKFRSRNESYMRAMSTISQVSEMEVNGQFESVCESVFSELESQAVEALDLPMPGCFRMRSHSYVRAIEKGCSQDDECVSLRSSSPPRTTTTVRTIQSSTVSSCITTYKKTPPPVPPRTTTKPFISITAQSSTESAQDAYMDGQGQRGDIISQSGLSNSTESLDSMKALTAAIEAANAQIHGPASQHMGNNTATVTTTTTIATVTTEDRKKDHFKKNRCLSIGIQVDDAEEPDKTGENKAPSKFQSVGVQVEEEKCFRRFTRSNSVTTAVQADLDFHDNLENSLESIEDNSCPGPMARQFSRDASTSTVSIQGSGNHYHACAADDDFDTDFDPSILPPPDPWIDSITEDPLEAVQRSVCHRDGHWFLKLLQAERDRMEGWCQQMEREERENNLPEDILGKIRTAVGSAQLLMAQKFYQFRELCEENLNPNAHPRPTSQDLAGFWDMLQLSIENISMKFDELHQLKANNWKQMDPLDKKVEQCRFCMVHLKTCTNTGQSK

SEQ ID NO: 220 - protein, 975 aa, Homo sapiens
MKGLSGSRTQPPLCSGHTCGLAPPEDCEHLHHGPDARPPYLLSPADSCPGGRHRCSPRSSVHSECVMMPVVLGDHVSSSTFPRMHYSSHYDTRDDCAVAHAGAKINRIPANLLDQFEKQLPLHRDGFHTLQYQRTSAAAEQRSESPGRIRHLVHSVQKLFTKSHSLEGSSKSNANGTKADGRADDHHHAHHAKHSKRSKSKERKPEGKPRPGMSSWWSSDDNLDSDSTYRTPSVLNRHHLGPVAHCYPDALQSPFGDLSLKTSKSNNDVKCSACEGLALTPDAKYLKRSSWSTLTVSQAKEAYRKSSLNLDKPLLHQDAKPALRPCHYLQVPQDEWGGYPTGGKDEEIPCRRMRSGSYIKAMGDEESGESDSSPKTSPKSAILPEPLLKSIGQRPLGEHQTQTYLQAASDVPVGHSLDPAANYNSPKFRSRNQSYMRAVSTLSQASCVSQVSEAEINGQFESVCESVFSEVESQAMDALDLPGCFRTRSHSYLRAIQAGYSQDDECIPMMTPSDITSTIRSTAAVSYTNYKKTPPPVPPRTTSKPLISVTAQSSTESTQDAYQDSRAQRMSPWPQDSRGLYNSTDSLDSNKAMNLALETAAAQRHLPESQSSSVRTSDKAILVSKAEELLKSRCSSIGIQDSEFPEHQPYPRSDVETATDSDTESRGLREYHSVGVQVEDEKRHGRFKRSNSVTAAVQADLELEGFPGHITTEDKGLQFGSSFQRHSEPSTPTQYSAVRTVRTQGLFSYREDYRTQVDTSTLPPPDPWLEPAIDTVETGRMSPCRRDGSWFLKLLHAETKRMEGWCKEMEREAEENDLSEEILGKIRSAVGSAQLLMSQKFQQFYWLCQQNMDPSAMPRPTSQDLAGYWDMLQLSIEDVSMKFDELQRLRLNDWKMMESPERKEERKVPPPIPKKPPKGKFPITREKSLDLPDRQRQEARRRLMAAKRAASFRQNSASERADSIEIYIPEAQTRL

SEQ ID NO: 221-223 - skipped (3 entries)

SEQ ID NO: 224 - protein, 979 aa, Homo sapiens
MRGYHGDRGSHPRPARFADQQHMDVGPAARAPYLLGSREAFSTEPRFCAPRAGLGHISPEGPLSLSEGPSVGPEGGPAGAGVGGGSSTFPRMYPGQGPFDTCEDCVGHPQGKGAPRLPPTLLDQFEKQLPVQQDGFHTLPYQRGPAGAGPGPAPGTGTAPEPRSESPSRIRHLVHSVQKLFAKSHSLEAPGKRDYNGPKAEGRGGSGGDSYPGPGSGGPHTSHHHHHHHHHHHHQSRHGKRSKSKDRKGDGRHQAKSTGWWSSDDNLDSDSGFLAGGRPPGEPGGPFCLEGPDGSYRDLSFKGRSGGSEGRCLACTGMSMSLDGQSVKRSAWHTMMVSQGRDGYPGAGPGKGLLGPETKAKARTYHYLQVPQDDWGGYPTGGKDGEIPCRRMRSGSYIKAMGDEESGDSDGSPKTSPKAVARRFTTRRSSSVDQARINCCVPPRIHPRSSIPGYSRSLTTGQLSDELNQQLEAVCGSVFGELESQAVDALDLPGCFRMRSHSYLRAIQAGCSQDDDCLPLLATPAAVSGRPGSSFNFRKAPPPIPPGSQAPPRISITAQSSTDSAHESFTAAEGPARRCSSADGLDGPAMGARTLELAPVPPRASPKPPTLIIKTIPGREELRSLARQRKWRPSIGVQVETISDSDTENRSRREFHSIGVQVEEDKRRARFKRSNSVTAGVQADLELEGLAGLATVATEDKALQFGRSFQRHASEPQPGPRAPTYSVFRTVHTQGQWAYREGYPLPYEPPATDGSPGPAPAPTPGPGAGRRDSWIERGSRSLPDSGRASPCPRDGEWFIKMLRAEVEKLEHWCQQMEREAEDYELPEEILEKIRSAVGSTQLLLSQKVQQFFRLCQQSMDPTAFPVPTFQDLAGFWDLLQLSIEDVTLKFLELQQLKANSWKLLEPKEEKKVPPPIPKKPLRGRGVPVKERSLDSVDRQRQEARKRLLAAKRAASFRHSSATESADSIEIYIPEAQTRL

SEQ ID NO: 225 - protein, 255 aa, Homo sapiens
MTMTTMPESLNSPVSGKAVFMEFGPPNQQMSPSPMSHGHYSMHCLHSAGHSQPDGAYSSASSFSRPLGYPYVNSVSSHASSPYISSVQSYPGSASLAQSRLEDPGADSEKSTVVEGGEVRFNGKGKKIRKPRTIYSSLQLQALNRRFQQTQYLALPERAELAASLGLTQTQVKIWFQNKRSKFKKLMKQGGAALEGSALANGRALSAGSPPVPPGWNPNSSSGKGSGGNAGSYIPSYTSWYPSAHQEAMQQPQLM

SEQ ID NO: 226 - protein, 328 aa, Homo sapiens
MTGVFDSLVADMHSTQIAASSTYHQHQQPPSGGGAGPGGNSSSSSSLHKPQESPTLPVSTATDSSYYTNQQHPAGGGGGGGSPYAHMGSYQYQASGLNNVPYSAKSSYDLGYTAAYTSYAPYGTSSSPANNEPEKEDLEPEIRIVNGKPKKVRKPRTIYSSFQLAALQRRFQKTQYLALPERAELAASLGLTQTQVKIWFQNRRSKFKKMWKSGEIPSEQHPGASASPPCASPPVSAPASWDFGVPQRMAGGGGPGSGGSGAGSSGSSPSSAASAFLGNYPWYHQTSGSASHLQATAPLLHPTQTPQPHHHHHHHGGGGAPVSAGTIF

SEQ ID NO: 227 - protein, 293 aa, Homo sapiens
MMTMTTMADGLEGQDSSKSAFMEFGQQQQQQQQQQQQQQQQQQQPPPPPPPPPQPHSQQSSPAMAGAHYPLHCLHSAAAAAAAGSHHHHHHQHHHHGSPYASGGGNSYNHRSLAAYPYMSHSQHSPYLQSYHNSSAAAQTRGDDTDQQKTTVIENGEIRFNGKGKKIRKPRTIYSSLQLQALNHRFQQTQYLALPERAELAASLGLTQTQVKIWFQNKRSKFKKLLKQGSNPHESDPLQGSAALSPRSPALPPVWDVSASAKGVSMPPNSYMPGYSHWYSSPHQDTMQRPQMM

SEQ ID NO: 228 - protein, 3685 aa, Homo sapiens
MLWWEEVEDCYEREDVQKKTFTKWVNAQFSKFGKQHIENLFSDLQDGRRLLDLLEGLTGQKLPKEKGSTRVHALNNVNKALRVLQNNNVDLVNIGSTDIVDGNHKLTLGLIWNIILHWQVKNVMKNIMAGLQQTNSEKILLSWVRQSTRNYPQVNVINFTTSWSDGLALNALIHSHRPDLFDWNSVVCQQSATQRLEHAFNIARYQLGIEKLLDPEDVDTTYPDKKSILMYITSLFQVLPQQVSIEAIQEVEMLPRPPKVTKEEHFQLHHQMHYSQQITVSLAQGYERTSSPKPRFKSYAYTQAAYVTTSDPTRSPFPSQHLEAPEDKSFGSSLMESEVNLDRYQTALEEVLSWLLSAEDTLQAQGEISNDVEVVKDQFHTHEGYMMDLTAHQGRVGNILQLGSKLIGTGKLSEDEETEVQEQMNLLNSRWECLRVASMEKQSNLHRVLMDLQNQKLKELNDWLTKTEERTRKMEEEPLGPDLEDLKRQVQQHKVLQEDLEQEQVRVNSLTHMVVVVDESSGDHATAALEEQLKVLGDRWANICRWTEDRWVLLQDILLKWQRLTEEQCLFSAWLSEKEDAVNKIHTTGFKDQNEMLSSLQKLAVLKADLEKKKQSMGKLYSLKQDLLSTLKNKSVTQKTEAWLDNFARCWDNLVQKLEKSTAQISQAVTTTQPSLTQTTVMETVTTVTTREQILVKHAQEELPPPPPQKKRQITVDSEIRKRLDVDITELHSWITRSEAVLQSPEFAIFRKEGNFSDLKEKVNAIEREKAEKFRKLQDASRSAQALVEQMVNEGVNADSIKQASEQLNSRWIEFCQLLSERLNWLEYQNNIIAFYNQLQQLEQMTTTAENWLKIQPTTPSEPTAIKSQLKICKDEVNRLSGLQPQIERLKIQSIALKEKGQGPMFLDADFVAFTNHFKQVFSDVQAREKELQTIFDTLPPMRYQETMSAIRTWVQQSETKLSIPQLSVTDYEIMEQRLGELQALQSSLQEQQSGLYYLSTTVKEMSKKAPSEISRKYQSEFEEIEGRWKKLSSQLVEHCQKLEEQMNKLRKIQNHIQTLKKWMAEVDVFLKEEWPALGDSEILKKQLKQCRLLVSDIQTIQPSLNSVNEGGQKIKNEAEPEFASRLETELKELNTQWDHMCQQVYARKEALKGGLEKTVSLQKDLSEMHEWMTQAEEEYLERDFEYKTPDELQKAVEEMKRAKEEAQQKEAKVKLLTESVNSVIAQAPPVAQEALKKELETLTTNYQWLCTRLNGKCKTLEEVWACWHELLSYLEKANKWLNEVEFKLKTTENIPGGAEEISEVLDSLENLMRHSEDNPNQIRILAQTLTDGGVMDELINEELETFNSRWRELHEEAVRRQKLLEQSIQSAQETEKSLHLIQESLTFIDKQLAAYIADKVDAAQMPQEAQKIQSDLTSHEISLEEMKKHNQGKEAAQRVLSQIDVAQKKLQDVSMKFRLFQKPANFEQRLQESKMILDEVKMHLPALETKSVEQEVVQSQLNHCVNLYKSLSEVKSEVEMVIKTGRQIVQKKQTENPKELDERVTALKLHYNELGAKVTERKQQLEKCLKLSRKMRKEMNVLTEWLAATDMELTKRSAVEGMPSNLDSEVAWGKATQKEIEKQKVHLKSITEVGEALKTVLGKKETLVEDKLSLLNSNWIAVTSRAEEWLNLLLEYQKHMETFDQNVDHITKWIIQADTLLDESEKKKPQQKEDVLKRLKAELNDIRPKVDSTRDQAANLMANRGDHCRKLVEPQISELNHRFAAISHRIKTGKASIPLKELEQFNSDIQKLLEPLEAEIQQGVNLKEEDFNKDMNEDNEGTVKELLQRGDNLQQRITDERKREEIKIKQQLLQTKHNALKDLRSQRRKKALEISHQWYQYKRQADDLLKCLDDIEKKLASLPEPRDERKIKEIDRELQKKKEELNAVRRQAEGLSEDGAAMAVEPTQIQLSKRWREIESKFAQFRRLNFAQIHTVREETMMVMTEDMPLEISYVPSTYLTEITHVSQALLEVEQLLNAPDLCAKDFEDLFKQEESLKNIKDSLQQSSGRIDIIHSKKTAALQSATPVERVKLQEALSQLDFQWEKVNKMYKDRQGRFDRSVEKWRRFHYDIKIFNQWLTEAEQFLRKTQIPENWEHAKYKWYLKELQDGIGQRQTVVRTLNATGEEIIQQSSKTDASILQEKLGSLNLRWQEVCKQLSDRKKRLEEQKNILSEFQRDLNEFVLWLEEADNIASIPLEPGKEQQLKEKLEQVKLLVEELPLRQGILKQLNETGGPVLVSAPISPEEQDKLENKLKQTNLQWIKVSRALPEKQGEIEAQIKDLGQLEKKLEDLEEQLNHLLLWLSPIRNQLEIYNQPNQEGPFDVQETEIAVQAKQPDVEEILSKGQHLYKEKPATQPVKRKLEDLSSEWKAVNRLLQELRAKQPDLAPGLTTIGASPTQTVTLVTQPVVTKETAISKLEMPSSLMLEVPALADFNRAWTELTDWLSLLDQVIKSQRVMVGDLEDINEMIIKQKATMQDLEQRRPQLEELITAAQNLKNKTSNQEARTIITDRIERIQNQWDEVQEHLQNRRQQLNEMLKDSTQWLEAKEEAEQVLGQARAKLESWKEGPYTVDAIQKKITETKQLAKDLRQWQTNVDVANDLALKLLRDYSADDTRKVHMITENINASWRSIHKRVSEREAALEETHRLLQQFPLDLEKFLAWLTEAETTANVLQDATRKERLLEDSKGVKELMKQWQDLQGEIEAHTDVYHNLDENSQKILRSLEGSDDAVLLQRRLDNMNFKWSELRKKSLNIRSHLEASSDQWKRLHLSLQELLVWLQLKDDELSRQAPIGGDFPAVQKQNDVHRAFKRELKTKEPVIMSTLETVRIFLTEQPLEGLEKLYQEPRELPPEERAQNVTRLLRKQAEEVNTEWEKLNLHSADWQRKIDETLERLQELQEATDELDLKLRQAEVIKGSWQPVGDLLIDSLQDHLEKVKALRGEIAPLKENVSHVNDLARQLTTLGIQLSPYNLSTLEDLNTRWKLLQVAVEDRVRQLHEAHRDFGPASQHFLSTSVQGPWERAISPNKVPYYINHETQTTCWDHPKMTELYQSLADLNNVRFSAYRTAMKLRRLQKALCLDLLSLSAACDALDQHNLKQNDQPMDILQIINCLTTIYDRLEQEHNNLVNVPLCVDMCLNWLLNVYDTGRTGRIRVLSFKTGIISLCKAHLEDKYRYLFKQVASSTGFCDQRRLGLLLHDSIQIPRQLGEVASFGGSNIEPSVRSCFQFANNKPEIEAALFLDWMRLEPQSMVWLPVLHRVAAAETAKHQAKCNICKECPIIGFRYRSLKHFNYDICQSCFFSGRVAKGHKMHYPMVEYCTPTTSGEDVRDFAKVLKNKFRTKRYFAKHPRMGYLPVQTVLEGDNMETPVTLINFWPVDSAPASSPQLSHDDTHSRIEHYASRLAEMENSNGSYLNDSISPNESIDDEHLLIQHYCQSLNQDSPLSQPRSPAQILISLESEERGELERILADLEEENRNLQAEYDRLKQQHEHKGLSPLPSPPEMMPTSPQSPRDAELIAEAKLLRQHKGRLEARMQILEDHNKQLESQLHRLRQLLEQPQAEAKVNGTTVSSPSTSLQRSDSSQPMLLRVVGSQTSDSMGEEDLLSPPQDTSTGLEEVMEQLNNSFPSSRGRNTPGKPMREDTM

SEQ ID NO: 229 - protein, 639 aa, Homo sapiens
MGGHFWPPEPYTVFMWGSPWEADSPRVKLRGREKGRQTEGGAFPLVSSALSGDPRFFSPTTPPAEPIVVRLKEVRLQRDDFEILKVIGRGAFSEVAVVKMKQTGQVYAMKIMNKWDMLKRGEVSCFREERDVLVNGDRRWITQLHFAFQDENYLYLVMEYYVGGDLLTLLSKFGERIPAEMARFYLAEIVMAIDSVHRLGYVHRDIKPDNILLDRCGHIRLADFGSCLKLRADGTVRSLVAVGTPDYLSPEILQAVGGGPGTGSYGPECDWWALGVFAYEMFYGQTPFYADSTAETYGKIVHYKEHLSLPLVDEGVPEEARDFIQRLLCPPETRLGRGGAGDFRTHPFFFGLDWDGLRDSVPPFTPDFEGATDTCNFDLVEDGLTAMVSGGGETLSDIREGAPLGVHLPFVGYSYSCMALRDSEVPGPTPMELEAEQLLEPHVQAPSLEPSVSPQDETAEVAVPAAVPAAEAEAEVTLRELQEALEEEVLTRQSLSREMEAIRTDNQNFASQLREAEARNRDLEAHVRQLQERMELLQAEGATAVTGVPSPRATDPPSHLDGPPAVAVGQCPLVGPGPMHRRHLLLPARVPRPGLSEALSLLLFAVVLSRAAALGCIGLVAHAGQLTAVWRRPGAARAP

SEQ ID NO: 230 - protein, 3037 aa, Homo sapiens
MHLHQVLTGAVNPGDNCYSVGSVGDVPFTAYGSGCDIVILANDFECVQIIPGAKHGNIQVSCVECSNQQGRIAASYGNAVCIFEPLGINSHKRNCQLKCQWLKTGQFFLSSVTYNLAWDPQDNRLLTATDSIQLWAPPGDDILEEEEEIDNTVPPVLNDWKCVWQCKTSVSVHLMEWSPDGEYFATAGKDDCLLKVWYPMTGWKSSIIPQDHHEVKRRQSSTQFSFVYLAHPRAVTGFSWRKTSKYMPRGSVCNVLLTSCHDGVCRLWAETLLPEDCLLGEQICETTTSSIASSLSHAGRHKDRIQHALETIHHLKNLRKGQRRSSVLVTHAELMPDQTAMHEVQRHISHHANALCHFHIAASINPATDIPNVLVGTAFNVDDGNGGFVVHWLNNKEFHFTSSTEVFMHQLRKLSDKQVDHENDDADREDEEHSQEDRERGLHMKLDHDLSLDRESEAGTGSSEHEDGEREGSPRTYSRLSVPMPLPTVLLDRKIETLLTEWNKNPDMLFTIHPVDGTFLVWHVKYLDEYNPGIFRQVQVSFSSRIPVAFPSGDASSLSKNIMMYACINATKDSHHTLLHQEGMSVGSPHGSQPHSRSHSTHMNILAPTVMMISKHIDGSLNQWAVTFADKSAFTTVLTVSHKFRYCGHRFHLNDLACHSVLPLLLTSSHHNALLTPELDCQWDSDNKLSRLMDPVKHIKGSSKQPLRNAATRTFHDPNAIYSELILWRVDPIGPLSYTGGVSELARINSLHTSAFSNVAWLPTLIPSYCLGTYCNSASACFVASDGKNLRLYQAVVDARKLLDELSDPESSKLIGEVFNIVSQQSTARPGCIIELDAITNQCGSNTQLLHVFQEDFIIGYKPHKEDMEKKETEIFFQPSQGYRPPPFSEKFFLVVIEKDSNNNSILHMWHLHLKSVQACLAKASEGASSESLLSVPGQKNVDSSPETSPSVSPMPHSSSIANLQTASKLILSSRLVYSQPLDLPESVEVIRATPSAGHLSSSSIYPVCLAPYLVVTTCSDNKVRFWKCCMEANPECNKSDEKEIYHWKRWPLMNDEGEDNSSTVSIVGRPVAVSCSYTGRLAVAYKQPIHHNGFVSKEFSMHVCIFECESTGGSEWVLEQTIHLDDLVKVGSVLDSRVSVDSNLFVYSKSDALLSKDRYLIPNIKHLVHLDWVSKEDGSHILTVGVGANIFMYGRLSGIVTEQTNSKDGVAVITLPLGGSIKQGVKSRWVLLRSIDLVSSVDGTPSLPVSLSWVRDGILVVGMDCEMHVYAQWKHAVKFGDTEADSSNAEEAAMQDHSTFKSNMLARKSVVEGTAISDDVFCSPTVIQDGGLFEAAHVLSPTLPQYHPTQLLELMDLGKVRRAKAILSHLVKCIAGEVAIVRDPDAGEGTKRHLSRTISVSGSTAKETVTVGKDGTRDYTEIDSIPPLPLYALLAADQDTSYRISEESTKIPQSYEDQTVSQPEDQYSELFQIQDIPTDDIDLEPEKRENKSKVINLSQYGPAYFGQEHARVLSSHLMHSSLPGLTRLEQMFLVALADTVATTSTELDESRDKSCSGRDTLDECGLRYLLAMRLHTCLLTSLPPLYRVQLLHQGVSTCHFAWAFHSEAEEELINMIPAIQRGDPQWSELRAMGIGWWVRNINTLRRCIEKVAKASFQRNNDALDAALFYLSMKKKAVVWGLFRSQHDEKMTTFFSHNFNEDRWRKAALKNAFSLLGKQRFEQSAAFFLLAGSLKDAIEVCLEKMEDIQLAMVIARLYESEFETSSTYISILNQKILGCQKDGSGFSCKRLHPDPFLRSLAYWVMKDYTRALDTLLEQTPKEDDEHQVIIKSCNPVAFSFYNYLRTHPLLIRRNLASPEGTLATLGLKTEKNFVDKINLIERKLFFTTANAHFKVGCPVLALEVLSKIPKVTKTSALSAKKDQPDFISHRMDDVPSHSKALSDGNGSSGIEWSNVTSSQYDWSQPIVKVDEEPLNLDWGEDHDSALDEEEDDAVGLVMKSTDAREKDKQSDQKASDPNMLLTPQEEDDPEGDTEVDVIAEQLKFRACLKILMTELRTLATGYEVDGGKLRFQLYNWLEKEIAALHEICNHESVIKEYSSKTYSKVESDLLDQEEMVDKPDIGSYERHQIERRRLQAKREHAERRKSWLQKNQDLLRVFLSYCSLHGAQGGGLASVRMELKFLLQESQQETTVKQLQSPLPLPTTLPLLSASIASTKTVIANPVLYLNNHIHDILYTIVQMKTPPHPSIEDVKVHTLHSLAASLSASIYQALCDSHSYSSQTEGNQFTGMAYQGLLLSDRRRLRTESIEEHATPNSSPAQWPGVSSLINLLSSAQDEDQPKLNILLCEAVVAVYLSLLIHALATNSSSELFRLAAHPLNNRMWAAVFGGGVKLVVKPRRQSENISAPPVLSEDIDKHRRRFNMRMLVPGRPVKDATPPPVPAERPSYKEKFIPPELSMWDYFVAKPFLPLSDSGVIYDSDESIHSDEEDDAFFSDTQIQEHQDPNSYSWALLHLTMVKLALHNVKNFFPIAGLEFSELPVTSPLGIAVIKNLENWEQILQEKMDQFEGPPPNYINTYPTDLSVGAGPAILRNKAMLEPENTPFKSRDSSAFPVKRLWHFLVKQEVLQETFIRYIFTKKRKQSEVEADLGYPGGKAKVIHKESDMIMAFSVNKANCNEIVLASTHDVQELDVTSLLACQSYIWIGEEYDRESKSSDDVDYRGSTTTLYQPSATSYSASQVHPPSSLPWLGTGQTSTGASVLMKRNLHNVKRMTSHPVHQYYLTGAQDGSVRMFEWTRPQQLVCFRQAGNARVTRLYFNSQGNKCGVADGEGFLSIWQVNQTASNPKPYMSWQCHSKATSDFAFITSSSLVATSGHSNDNRNVCLWDTLISPGNSLIHGFTCHDHGATVLQYAPKQQLLISGGRKGHVCIFDIRQRQLIHTFQAHDSAIKALALDPYEEYFTTGSAEGNIKVWRLTGHGLIHSFKSEHAKQSIFRNIGAGVMQIDIIQGNRLFSCGADGTLKTRVLPNAFNIPNRILDIL

SEQ ID NO: 231 - protein, 4471 aa, Homo sapiens
MVPEEVEVEIDEIPVLSEEGEEEEETYSQKVESVDKVRAKRVSLRTESLGQPLNREDEEMDKEISEKLPSKRTAKHIMEKMHLHMLCTPLPEEFLDQNVVFFLRNTKEAISEATDMKEAMEIMPETLEYGIINANVLHFLKNIICQVFLPALSFNQHRTSTTVGVTSGEVSNSSEHESDLPPMPGEAVEYHSIQLIRDEFLMNVQKFASNIQRTMQQLEGEIKLEMPIISVEGEVSDLAADPETVDILEQCVINWLNQISTAVEAQLKKTPQGKGPLAEIEFWRERNATLSALHEQTKLPIVRKVLDVIKESDSMLVANLQPVFTELFKFHTEASDNVRFLSTVERYFKNITHGSGFHVVLDTIPAMMSALRMVWIISRHYNKDERMIPLMERIAWEIAERVCRVVNLRTLFKENRASAQSKTLEARNTLRLWKKAYFDTRAKIEASGREDRWEFDRKRLFERTDYMATICQDLSDVLQILEEFYNIFGPELKAVTGDPKRIDDVLCRVDGLVTPMENLTFDPFSIKSSQFWKYVMDEFKIEVLIDIINKIFVQNLENPPLYKNHPPVAGAIYWERSLFFRIKHTILRFQEVQEILDSDRGQEVKQKYLEVGRTMKEYEDRKYEQWMEVTEQVLPALMKKSLLTKSSIATEEPSTLERGAVFAINFSPALREIINETKYLEQLGFTVPELARNVALQEDKFLRYTAGIQRMLDHYHMLIGTLNDAESVLLKDHSQELLRVFRSGYKRLNWNSLGIGDYITGCKQAIGKFESLVHQIHKNADDISSRLTLIEAINLFKYPAAKSEEELPGVKEFFEHIERERASDVDHMVRWYLAIGPLLTKVEGLVVHTNTGKAPKLASYYKYWEKKIYEVLTKLILKNLQSFNSLILGNVPLFHTETILTAPEIILHPNTNEIDKMCFHCVRNCVEITKHFVRWMNGSCIECPPQKGEEEEVVIINFYNDISLNPQIIEQAVMIPQNVHRILINLMKYLQKWKRYRPLWKLDKAIVMEKFAAKKPPCVAYDEKLQFYSKIAYEVMRHPLIKDEHCIRLQLRHLANTVQENAKSWVISLGKLLNESAKEELYNLHEEMEHLAKNLRKIPNTLEDLKFVLATIAEIRSKSLVMELRYRDVQERYRTMAMYNLFPPDAEKELVDKIESIWSNLFNDSVNVEHALGDIKRTFTELTRGEIMNYRVQIEEFAKRFYSEGPGSVGDDLDKGVELLGVYERELARHEKSRQELANAEKLFDLPITMYPELLKVQKEMSGLRMIYELYEGLKVAKEEWSQTLWINLNVQILQEGIEGFLRALRKLPRPVRGLSVTYYLEAKMKAFKDSIPLLLDLKNEALRDRHWKELMEKTSVFFEMTETFTLENMFAMELHKHTDVLNEIVTAAIKEVAIEKAVKEILDTWENMKFTVVKYCKGTQERGYILGSVDEIIQSLDDNTFNLQSISGSRFVGPFLQTVHKWEKTLSLIGEVIEIWMLVQRKWMYLESIFIGGDIRSQLPEEAKKFDNIDKVFKRIMGETLKDPVIKRCCEAPNRLSDLQNVSEGLEKCQKSLNDYLDSKRNAFPRFFFISDDELLSILGSSDPLCVQEHMIKMYDNIASLRFNDGDSGEKLVSAMISAEGEVMEFRKILRAEGRVEDWMTAVLNEMRRTNRLITKEAIFRYCEDRSRVDWMLLYQGMVVLAASQVWWTWEVEDVFHKAQKGEKQAMKNYGRKMHRQIDELVTRITMPLSKNDRKKYNTVLIIDVHARDIVDSFIRGSILEAREFDWESQLRFYWDREPDELNIRQCTGTFGYGYEYMGLNGRLVITPLTDRIYLTLTQALSMYLGGAPAGPAGTGKTETTKDLAKALGLLCVVTNCGEGMDYRAVGKIFSGLAQCGAWGCFDEFNRIDASVLSVISSQIQTIRNALIHQLTTFQFEGQEISLDSRMGIFITMNPGYAGRTELPESVKALFRPVVVIVPDLQQICEIMLFSEGFLEAKTLAKKMTVLYKLAREQLSKQYHYDFGLRALKSVLVMAGELKRGSSDLREDVVLMRALRDMNLPKFVFEDVPLFLGLISDLFPGLDCPRVRYPDFNDAVEQVLEENGYAVLPIQVDKVVQMFETMLTRHTTMVVGPTRGGKSVVINTLCQAQTKLGLTTKLYILNPKAVSVIELYGILDPTTRDWTDGVLSNIFREINKPTDKKERKYILFDGDVDALWVENMNSVMDDNRLLTLANGERIRLQAHCALLFEVGDLQYASPATVSRCGMVYVDPKNLKYRPYWKKWVNQIPNKVEQYNLNSLFEKYVPYLMDVIVEGIVDGRQAEKLKTIVPQTDLNMVTQLAKMLDALLEGEIEDLDLLECYFLEALYCSLGASLLEDGRMKFDEYIKRLASLSTVDTEGVWANPGELPGQLPTLYDFHFDNKRNQWVPWSKLVPEYIHAPERKFINILVHTVDTTRTTWILEQMVKIKQPVIFVGESGTSKTATTQNFLKNLSEETNIVLMVNFSSRTTSMDIQRNLEANVEKRTKDTYGPPMGKRLLVFMDDMNMPRVDEYGTQQPIALLKLLLEKGYLYDRGKELNCKSIRDLGFIAAMGKAGGGRNEVDPRFISLFSVFNVPFPSEESLHLIYSSILKGHTSTFHESIVAVSGKLTFCTLALYKNIVQDLPPTPSKFHYIFNLRDLSRVFNGLVLTNPERFQTVAQMVRVWRNECLRVFHDRLISETDKQLVQQHIGSLVVEHFKDDVEVVMRDPILFGDFQMALHEGEPRIYEDIQDYEAAKALFQEILEEYNESNTKMNLVLFDDALEHLTRVHRIIRMDRGHALLVGVGGSGKQSLSRLAAFTASCEVFEILLSRGYSENSFREDLKSLYLKLGIENKAMIFLFTDAHVAEEGFLELINNMLTSGIVPALFSEEEKESILSQIGQEALKQGMGPAKESVWQYFVNKSANNLHIVLGMSPVGDTLRTWCRNFPGMVNNTGIDWFMPWPPQALHAVAKSFLGYNPMIPAENIENVVKHVVLVHQSVDHYSQQFLQKLRRSNYVTPKNYLDFINTYSKLLDEKTQCNIAQCKRLDGGLDKLKEATIQLDELNQKLAEQKIVLAEKSAACEALLEEIAVNTAVAEEKKKLAEEKAMEIEEQNKVIAMEKAEAETTLAEVMPILEAAKLELQKLDKSDVTEIRSFAKPPKQVQTVCECILIMKGYKELNWKTAKGVMSDPNFLRSLMEIDFDSITQSQVKNIKGLLKTLNTTTEEMEAVSKAGLGMLKFVEAVMGYCDVFREIKPKREKVARLERNFYLTKRELERIQNELAAIQKELETLGAKYEAAILEKQKLQEEAEIMERRLIAADKLISGLGSENIRWLNDLDELMHRRVKLLGDCLLCAAFLSYEGAFTWEFRDEMVNRIWQNDILEREIPLSQPFRLESLLTDDVEISRWGSQGLPPDELSVQNGILTTRASRFPLCIDPQQQALNWIKRKEEKNNLRVASFNDPDFLKQLEMSIKYGTPFLFRDVDEYIDPVIDNVLEKNIKVSQGRQFIILGDKEVDYDSNFRLYLNTKLANPRYSPSVFGKAMVINYTVTLKGLEDQLLSVLVAYERRELEEQREHLIQETSENKNLLKDLEDSLLRELATSTGNMLDNVDLVHTLEETKSKATEVSEKLKLAEKTALDIDRLRDGYRPAARRGAILFFVLSEMALVNSMYQYSLIAFLEVFRLSLKKSLPDSILMKRLRNIMDTLTFSIYNHGCTGLFERHKLLFSFNMTIKIEQAEGRVPQEELDFFLKGNISLEKSKRKKPCAWLSDQGWEDIILLSEMFSDNFGQLPDDVENNQTVWQEWYDLDSLEQFPVPLGYDNNITPFQKLLILRCFRVDRVYRAVTDYVTVTMGEKYVQPPMISFEAIFEQSTPHSPIVFILSPGSDPATDLMKLAERSGFGGNRLKFLAMGQGQEKVALQLLETAVARGQWLMLQNCHLLVKWLKDLEKSLERITKPHPDFRLWLTTDPTKGFPIGILQKSLKVVTEPPNGLKLNMRATYFKISHEMLDQCPHPAFKPLVYVLAFFHAVVQERRKFGKIGWNVYYDFNESDFQVCMEILNTYLTKAFQQRDPRIPWGSLKYLIGEVMYGGRAIDSFDRRILTIYMDEYLGDFIFDTFQPFHFFRNKEVDYKIPVGDEKEKFVEAIEALPLANTPEVFGLHPNAEIGYYTQAARDMWAHLLELQPQTGESSSGISRDDYIGQVAKEIENKMPKVFDLDQVRKRLGTGLSPTSVVLLQELERFNKLVVRMTKSLAELQRALAGEVGMSNELDDVARSLFIGHIPNIWRRLAPDTLKSLGNWMVYFLRRFSQYMLWVTESEPSVMWLSGLHIPESYLTALVQATCRKNGWPLDRSTLFTQVTKFQDADEVNERAGQGCFVSGLYLEGADWDIEKGCLIKSKPKVLVVDLPILKIIPIEAHRLKLQNTFRTPVYTTSMRRNAMGVGLVFEADLFTTRHISHWVLQGVCLTLNSD

SEQ ID NO: 232 - skipped

SEQ ID NO: 233 - protein, 116 aa, Homo sapiens
MASTVVAVGLTIAAAGFAGRYVLQAMKHMEPQVKQVFQSLPKSAFSGGYYRGGFEPKMTKREAALILGVSPTANKGKIRDAHRRIMLLNHPDKGGSPYIAAKINEAKDLLEGQAKK

SEQ ID NO: 234 - protein, 737 aa, Homo sapiens
MQPRRAQAPGAQLLPALALLLLLLGAGPRGSSLANPVPAAPLSAPGPCAAQPCRNGGVCTSRPEPDPQHPAPAGEPGYSCTCPAGISGANCQLVADPCASNPCHHGNCSSSSSSSSDGYLCICNEGYEGPNCEQALPSLPATGWTESMAPRQLQPVPATQEPDKILPRSQATVTLPTWQPKTGQKVVEMKWDQVEVIPDIACGNASSNSSAGGRLVSFEVPQNTSVKIRQDATASLILLWKVTATGFQQCSLIDGRSVTPLQASGGLVLLEEMLALGNNHFIGFVNDSVTKSIVALRLTLVVKVSTCVPGESHANDLECSGKGKCTTKPSEATFSCTCEEQYVGTFCEEYDACQRKPCQNNASCIDANEKQDGSNFTCVCLPGYTGELCQSKIDYCILDPCRNGATCISSLSGFTCQCPEGYFGSACEEKVDPCASSPCQNNGTCYVDGVHFTCNCSPGFTGPTCAQLIDFCALSPCAHGTCRSVGTSYKCLCDPGYHGLYCEEEYNECLSAPCLNAATCRDLVNGYECVCLAEYKGTHCELYKDPCANVSCLNGATCDSDGLNGTCICAPGFTGEECDIDINECDSNPCHHGGSCLDQPNGYNCHCPHGWVGANCEIHLQWKSGHMAESLTNMPRHSLYIIIGALCVAFILMLIILIVGICRISRIEYQGSSRPAYEEFYNCRSIDSEFSNAIASIRHARFGKKSRPAMYDVSPIAYEDYSPDDKPLVTLIKTKDL

SEQ ID NO: 235 - protein, 736 aa, Homo sapiens
MEALIPVINKLQDVFNTVGADIIQLPQIVVVGTQSSGKSSVLESLVGRDLLPRGTGIVTRRPLILQLVHVSQEDKRKTTGEENGVEAEEWGKFLHTKNKLYTDFDEIRQEIENETERISGNNKGVSPEPIHLKIFSPNVVNLTLVDLPGMTKVPVGDQPKDIELQIRELILRFISNPNSIILAVTAANTDMATSEALKISREVDPDGRRTLAVITKLDLMDAGTDAMDVLMGRVIPVKLGIIGVVNRSQLDINNKKSVTDSIRDEYAFLQKKYPSLANRNGTKYLARTLNRLLMHHIRDCLPELKTRINVLAAQYQSLLNSYGEPVDDKSATLLQLITKFATEYCNTIEGTAKYIETSELCGGARICYIFHETFGRTLESVDPLGGLNTIDILTAIRNATGPRPALFVPEVSFELLVKRQIKRLEEPSLRCVELVHEEMQRIIQHCSNYSTQELLRFPKLHDAIVEVVTCLLRKRLPVTNEMVHNLVAIELAYINTKHPDFADACGLMNNNIEEQRRNRLARELPSAVSRDKSSKVPSALAPASQEPSPAASAEADGKLIQDSRRETKNVASGGGGVGDGVQEPTTGNWRGMLKTSKAEELLAEEKSKPIPIMPASPQKGHAVNLLDVPVPVARKLSAREQRDCEVIERLIKSYFLIVRKNIQDSVPKAVMHFLVNHVKDTLQSELVGQLYKSSLLDDLLTESEDMAQRRKEAADMLKALQGASQIIAEIRETHLW

SEQ ID NO: 236 - protein, 912 aa, Homo sapiens
MPAMPSSGPGDTSSSAAEREEDRKDGEEQEEPRGKEERQEPSTTARKVGRPGRKRKHPPVESGDTPKDPAVISKSPSMAQDSGASELLPNGDLEKRSEPQPEEGSPAGGQKGGAPAEGEGAAETLPEASRAVENGCCTPKEGRGAPAEAGKEQKETNIESMKMEGSRGRLRGGLGWESSLRQRPMPRLTFQAGDPYYISKRKRDEWLARWKREAEKKAKVIAGMNAVEENQGPGESQKVEEASPPAVQQPTDPASPTVATTPEPVGSDAGDKNATKAGDDEPEYEDGRGFGIGELVWGKLRGFSWWPGRIVSWWMTGRSRAAEGTRWVMWFGDGKFSVVCVEKLMPLSSFCSAFHQATYNKQPMYRKAIYEVLQVASSRAGKLFPVCHDSDESDTAKAVEVQNKPMIEWALGGFQPSGPKGLEPPEEEKNPYKEVYTDMWVEPEAAAYAPPPPAKKPRKSTAEKPKVKEIIDERTRERLVYEVRQKCRNIEDICISCGSLNVTLEHPLFVGGMCQNCKNCFLECAYQYDDDGYQSYCTICCGGREVLMCGNNNCCRCFCVECVDLLVGPGAAQAAIKEDPWNCYMCGHKGTYGLLRRREDWPSRLQMFFANNHDQEFDPPKVYPPVPAEKRKPIRVLSLFDGIATGLLVLKDLGIQVDRYIASEVCEDSITVGMVRHQGKIMYVGDVRSVTQKHIQEWGPFDLVIGGSPCNDLSIVNPARKGLYEGTGRLFFEFYRLLHDARPKEGDDRPFFWLFENVVAMGVSDKRDISRFLESNPVMIDAKEVSAAHRARYFWGNLPGMNRPLASTVNDKLELQECLEHGRIAKFSKVRTITTRSNSIKQGKDQHFPVFMNEKEDILWCTEMERVFGFPVHYTDVSNMSRLARQRLLGRSWSVPVIRHLFAPLKEYFACV

SEQ ID NO: 237 - protein, 1865 aa, Homo sapiens
MTRWVPTKREEKYGVAFYNYDARGADELSLQIGDTVHILETYEGWYRGYTLRKKSKKGIFPASYIHLKEAIVEGKGQHETVIPGDLPLIQEVTTTLREWSTIWRQLYVQDNREMFRSVRHMIYDLIEWRSQILSGTLPQDELKELKKKVTAKIDYGNRILDLDLVVRDEDGNILDPELTSTISLFRAHEIASKQVEERLQEEKSQKQNIDINRQAKFAATPSLALFVNLKNVVCKIGEDAEVLMSLYDPVESKFISENYLVRWSSSGLPKDIDRLHNLRAVFTDLGSKDLKREKISFVCQIVRVGRMELRDNNTRKLTSGLRRPFGVAVMDVTDIINGKVDDEDKQHFIPFQPVAGENDFLQTVINKVIAAKEVNHKGQGLWVTLKLLPGDIHQIRKEFPHLVDRTTAVARKTGFPEIIMPGDVRNDIYVTLVQGDFDKGSKTTAKNVEVTVSVYDEDGKRLEHVIFPGAGDEAISEYKSVIYYQVKQPRWFETVKVAIPIEDVNRSHLRFTFRHRSSQDSKDKSEKIFALAFVKLMRYDGTTLRDGEHDLIVYKAEAKKLEDAATYLSLPSTKAELEEKGHSATGKSMQSLGSCTISKDSFQISTLVCSTKLTQNVDLLGLLKWRSNTSLLQQNLRQLMKVDGGEVVKFLQDTLDALFNIMMENSESETFDTLVFDALVFIIGLIADRKFQHFNPVLETYIKKHFSATLAYTKLTKVLKNYVDGAEKPGVNEQLYKAMKALESIFKFIVRSRILFNQLYENKGEADFVESLLQLFRSINDMMSSMSDQTVRVKGAALKYLPTIVNDVKLVFDPKELSKMFTEFILNVPMGLLTIQKLYCLIEIVHSDLFTQHDCREILLPMMTDQLKYHLERQEDLEACCQLLSHILEVLYRKDVGPTQRHVQIIMEKLLRTVNRTVISMGRDSELIGNFVACMTAILRQMEDYHYAHLIKTFGKMRTDVVDFLMETFIMFKNLIGKNVYPFDWVIMNMVQNKVFLRAINQYADMLNKKFLDQANFELQLWNNYFHLAVAFLTQESLQLENFSSAKRAKILNKYGDMRRQIGFEIRDMWYNLGQHKIKFIPEMVGPILEMTLIPETELRKATIPIFFDMMQCEFHSTRSFQMFENEIITKLDHEVEGGRGDEQYKVLFDKILLEHCRKHKYLAKTGETFVKLVVRLMERLLDYRTIMHDENKENRMSCTVNVLNFYKEIEREEMYIRYLYKLCDLHKECDNYTEAAYTLLLHAKLLKWSEDVCVAHLTQRDGYQATTQGQLKEQLYQEIIHYFDKGKMWEEAIALGKELAEQYENEMFDYEQLSELLKKQAQFYENIVKVIRPKPDYFAVGYYGQGFPTFLRGKVFIYRGKEYERREDFEARLLTQFPNAEKMKTTSPPGDDIKNSPGQYIQCFTVKPKLDLPPKFHRPVSEQIVSFYRVNEVQRFEYSRPIRKGEKNPDNEFANMWIERTIYTTAYKLPGILRWFEVKSVFMVEISPLENAIETMQLTNDKINSMVQQHLDDPSLPINPLSMLLNGIVDPAVMGGFANYEKAFFTDRYLQEHPEAHEKIEKLKDLIAWQIPFLAEGIRIHGDKVTEALRPFHERMEACFKQLKEKVEKEYGVRIMPSSLDDRRGSRPRSMVRSFTMPSSSRPLSVASVSSLSSDSTPSRPGSDGFALEPLLPKKMHSRSQDKLDKDDLEKEKKDKKKEKRNSKHQEIFEKEFKPTDISLQQSEAVILSETISPLRPQRPKSQVMNVIGSERRFSVSPSSPSSQQTPPPVTPRAKLSFSMQSSLELNGMTGADVADVPPPLPLKGSVADYGNLMENQDLLGSPTPPPPPPHQRHLPPPLPSKTPPPPPPKTTRKQTSVDSGIVQ

SEQ ID NO: 238 - protein, 2186 aa, Homo sapiens
MAGERTRRFTRSLLRPGQAAELRHSAASAAAVAVSSRQQQRQEKPRLLEPLDYETVIEELEKTYRNDPLQDLLFFPSDDFSAATVSWDIRTLYSTVPEDAEHKAENLLVKEACKFYSSQWHVVNYKYEQYSGDIRQLPRAEYKPEKLPSHSFEIDHEDADKDEDTTSHSSSKGGGGAGGTGVFKSGWLYKGNFNSTVNNTVTVRSFKKRYFQLTQLPDNSYIMNFYKDEKISKEPKGCIFLDSCTGVVQNNRLRKYAFELKMNDLTYFVLAAETESDMDEWIHTLNRILQISPEGPLQGRRSTELTDLGLDSLDNSVTCECTPEETDSSENNLHADFAKYLTETEDTVKTTRNMERLNLFSLDPDIDTLKLQKKDLLEPESVIKPFEEKAAKRIMIICKALNSNLQGCVTENENDPITNIEPFFVSVALYDLRDSRKISADFHVDLNHAAVRQMLLGASVALENGNIDTITPRQSEEPHIKGLPEEWLKFPKQAVFSVSNPHSEIVLVAKIEKVLMGNIASGAEPYIKNPDSNKYAQKILKSNRQFCSKLGKYRMPFAWAVRSVFKDNQGNVDRDSRFSPLFRQESSKISTEDLVKLVSDYRRADRISKMQTIPGSLDIAVDNVPLEHPNCVTSSFIPVKPFNMMAQTEPTVEVEEFVYDSTKYCRPYRVYKNQIYIYPKHLKYDSQKCFNKARNITVCIEFKNSDEESAKPLKCIYGKPGGPLFTSAAYTAVLHHSQNPDFSDEVKIELPTQLHEKHHILFSFYHVTCDINAKANAKKKEALETSVGYAWLPLMKHDQIASQEYNIPIATSLPPNYLSFQDSASGKHGGSDIKWVDGGKPLFKVSTFVVSTVNTQDPHVNAFFQECQKREKDMSQSPTSNFIRSCKNLLNVEKIHAIMSFLPIILNQLFKVLVQNEEDEITTTVTRVLTDIVAKCHEEQLDHSVQSYIKFVFKTRACKERTVHEELAKNVTGLLKSNDSTTVKHVLKHSWFFFAIILKSMAQHLIDTNKIQLPRPQRFPESYQNELDNLVMVLSDHVIWKYKDALEETRRANHSVARFLKRCFTFMDRGYVFKMVNNYISMFSSGDLKTLCQYKFDFLQEVCQHEHFIPLCLPIRSANIPDPLTPSESTQELHASDMPEYSVTNEFCRKHFLIGILLREVGFALQEDQDVRHLALAVLKNLMAKHSFDDRYREPRKQAQIASLYMPLYGMLLDNMPRIYLKDLYPFTVNTSNQGSRDDLSTNGGFQSQTAIKHANSVDTSFSKDVLNSIAAFSSIAISTVNHADSRASLASLDSNPSTNEKSSEKTDNCEKIPRPLSLIGSTLRFDKLDQAETRSLLMCFLHIMKTISYETLIAYWQRAPSPEVSDFFSILDVCLQNFRYLGKRNIIRKIAAAFKFVQSTQNNGTLKGSNPSCQTSGLLSQWMHSTSSHEGHKQHRSQTLPIIRGKNALSNPKLLQMLDNTMTSNSNEIDIVHHVDTEANIATEVCLTILDLLSLFTQTHQRQLQQCDCQNSLMKRVFDTYMLFFQVNQSATALKHVFASLRLFVCKFPSAFFQGPADLCGSFCYEVLKCCNHRSRSTQTEASALLYFFMRKNFEFNKQKSIVRSHLQLIKAVSQLIADAGIGGSRFQHSLAITNNFANGDKQMKNSNFPAEVKDLTKRIRTVLMATAQMKEHEKDPEMLVDLQYSLANSYASTPELRRTWLESMAKIHARNGDLSEAAMCYIHIAALIAEYLKRKGYWKVEKICTASLLSEDTHPCDSNSLLTTPSGGSMFSMGWPAFLSITPNIKEEGAMKEDSGMQDTPYNENILVEQLYMCVEFLWKSERYELIADVNKPIIAVFEKQRDFKKLSDLYYDIHRSYLKVAEVVNSEKRLFGRYYRVAFYGQGFFEEEEGKEYIYKEPKLTGLSEISQRLLKLYADKFGADNVKIIQDSNKVNPKDLDPKYAYIQVTYVTPFFEEKEIEDRKTDFEMHHNINRFVFETPFTLSGKKHGGVAEQCKRRTILTTSHLFPYVKKRIQVISQSSTELNPIEVAIDEMSKKVSELNQLCTMEEVDMIRLQLKLQGSVSVKVNAGPMAYARAFLEETNAKKYPDNQVKLLKEIFRQFADACGQALDVNERLIKEDQLEYQEELRSHYKDMLSELSTVMNEQITGRDDLSKRGVDQTCTRVISKATPALPTVSISSSAEV

SEQ ID NO: 239 - protein, 1966 aa, Homo sapiens
MWIPTEHEKYGVVIASFRGTVPYGLSLEIGDTVQILEKCDGWYRGFALKNPNIKGIFPSSYVHLKNACVKNKGQFEMVIPTEDSVITEMTSTLRDWGTMWKQLYVRNEGDLFHRLWHIMNEILDLRRQVLVGHLTHDRMKDVKRHITARLDWGNEQLGLDLVPRKEYAMVDPEDISITELYRLMEHRHRKKDTPVQASSHHLFVQMKSLMCSNLGEELEVIFSLFDSKENRPISERFFLRLNRNGLPKAPDKPERHCSLFVDLGSSELRKDIYITVHIIRIGRMGAGEKKNACSVQYRRPFGCAVLSIADLLTGETKDDLILKVYMCNTESEWYQIHENIIKKLNARYNLTGSNAGLAVSLQLLHGDIEQIRREYSSVFSHGVSITRKLGFSNIIMPGEMRNDLYITIERGEFEKGGKSVARNVEVTMFIVDSSGQTLKDFISFGSGEPPASEYHSFVLYHNNSPRWSELLKLPIPVDKFRGAHIRFEFRHCSTKEKGEKKLFGFSFVPLMQEDGRTLPDGTHELIVHKCEENTNLQDTTRYLKLPFSKGIFLGNNNQAMKATKESFCITSFLCSTKLTQNGDMLDLLKWRTHPDKITGCLSKLKEIDGSEIVKFLQDTLDTLFGILDENSQKYGSKVFDSLVHIINLLQDSKFHHFKPVMDTYIESHFAGALAYRDLIKVLKWYVDRITEAERQEHIQEVLKAQEYIFKYIVQSRRLFSLATGGQNEEEFRCCIQELLMSVRFFLSQESKGSGALSQSQAVFLSSFPAVYSELLKLFDVREVANLVQDTLGSLPTILHVDDSLQAIKLQCIGKTVESQLYTNPDSRYILLPVVLHHLHIHLQEQKDLIMCARILSNVFCLIKKNSSEKSVLEEIDVIVASLLDILLRTILEITSRPQPSSSAMRFQFQDVTGEFVACLLSLLRQMTDRHYQQLLDSFNTKEELRDFLLQIFTVFRILIRPEMFPKDWTVMRLVANNVIITTVLYLSDALRKNFLNENFDYKIWDSYFYLAVIFINQLCLQLEMFTPSKKKKVLEKYGDMRVTMGCEIFSMWQNLGEHKLHFIPALIGPFLEVTLIPQPDLRNVMIPIFHDMMDWEQRRSGNFKQVEAKLIDKLDSLMSEGKGDETYRELFNSILLKKIERETWRESGVSLIATVTRLMERLLDYRDCMKMGEVDGKKIGCTVSLLNFYKTELNKEEMYIRYIHKLYDLHLKAQNFTEAAYTLLLYDELLEWSDRPLREFLTYPMQTEWQRKEHLHLTIIQNFDRGKCWENGIILCRKIAEQYESYYDYRNLSKMRMMEASLYDKIMDQQRLEPEFFRVGFYGKKFPFFLRNKEFVCRGHDYERLEAFQQRMLNEFPHAIAMQHANQPDETIFQAEAQYLQIYAVTPIPESQEVLQREGVPDNIKSFYKVNHIWKFRYDRPFHKGTKDKENEFKSLWVERTSLYLVQSLPGISRWFEVEKREVVEMSPLENAIEVLENKNQQLKTLISQCQTRQMQNINPLTMCLNGVIDAAVNGGVSRYQEAFFVKEYILSHPEDGEKIARLRELMLEQAQILEFGLAVHEKFVPQDMRPLHKKLVDQFFVMKSSLGIQEFSACMQASPVHFPNGSPRVCRNSAPASVSPDGTRVIPRRSPLSYPAVNRYSSSSLSSQASAEVSNITGQSESSDEVFNMQPSPSTSSLSSTHSASPNVTSSAPSSARASPLLSDKHKHSRENSCLSPRERPCSAIYPTPVEPSQRMLFNHIGDGALPRSDPNLSAPEKAVNPTPSSWSLDSGKEAKNMSDSGKLISPPVPPRPTQTASPARHTTSVSPSPAGRSPLKGSVQSFTPSPVEYHSPGLISNSPVLSGSYSSGISSLSRCSTSETSGFENQVNEQSAPLPVPVPVPVPSYGGEEPVRKESKTPPPYSVYERTLRRPVPLPHSLSIPVTSEPPALPPKPLAARSSHLENGARRTDPGPRPRPLPRKVSQL

SEQ ID NO: 240 - protein, 2099 aa, Homo sapiens
MATLPSAERRAFALKINRYSSAEIRKQFTLPPNLGQYHRQSISTSGFPSLQLPQFYDPVEPVDFEGLLMTHLNSLDVQLAQELGDFTDDDLDVVFTPKECRTLQPSLPEEGVELDPHVRDCVQTYIREWLIVNRKNQGSPEICGFKKTGSRKDFHKTLPKQTFESETLECSEPAAQAGPRHLNVLCDVSGKGPVTACDFDLRSLQPDKRLENLLQQVSAEDFEKQNEEARRTNRQAELFALYPSVDEEDAVEIRPVPECPKEHLGNRILVKLLTLKFEIEIEPLFASIALYDVKERKKISENFHCDLNSDQFKGFLRAHTPSVAASSQARSAVFSVTYPSSDIYLVVKIEKVLQQGEIGDCAEPYTVIKESDGGKSKEKIEKLKLQAESFCQRLGKYRMPFAWAPISLSSFFNVSTLEREVTDVDSVVGRSSVGERRTLAQSRRLSERALSLEENGVGSNFKTSTLSVSSFFKQEGDRLSDEDLFKFLADYKRSSSLQRRVKSIPGLLRLEISTAPEIINCCLTPEMLPVKPFPENRTRPHKEILEFPTREVYVPHTVYRNLLYVYPQRLNFVNKLASARNITIKIQFMCGEDASNAMPVIFGKSSGPEFLQEVYTAVTYHNKSPDFYEEVKIKLPAKLTVNHHLLFTFYHISCQQKQGASVETLLGYSWLPILLNERLQTGSYCLPVALEKLPPNYSMHSAEKVPLQNPPIKWAEGHKGVFNIEVQAVSSVHTQDNHLEKFFTLCHSLESQVTFPIRVLDQKISEMALEHELKLSIICLNSSRLEPLVLFLHLVLDKLFQLSVQPMVIAGQTANFSQFAFESVVAIANSLHNSKDLSKDQHGRNCLLASYVHYVFRLPEVQRDVPKSGAPTALLDPRSYHTYGRTSAAAVSSKLLQARVMSSSNPDLAGTHSAADEEVKNIMSSKIADRNCSRMSYYCSGSSDAPSSPAAPRPASKKHFHEELALQMVVSTGMVRETVFKYAWFFFELLVKSMAQHVHNMDKRDSFRRTRFSDRFMDDITTIVNVVTSEIAALLVKPQKENEQAEKMNISLAFFLYDLLSLMDRGFVFNLIRHYCSQLSAKLSNLPTLISMRLEFLRILCSHEHYLNLNLFFMNADTAPTSPCPSISSQNSSSCSSFQDQKIASMFDLTSEYRQQHFLTGLLFTELAAALDAEGEGISKVQRKAVSAIHSLLSSHDLDPRCVKPEVKVKIAALYLPLVGIILDALPQLCDFTVADTRRYRTSGSDEEQEGAGAINQNVALAIAGNNFNLKTSGIVLSSLPYKQYNMLNADTTRNLMICFLWIMKNADQSLIRKWIADLPSTQLNRILDLLFICVLCFEYKGKQSSDKVSTQVLQKSRDVKARLEEALLRGEGARGEMMRRRAPGNDRFPGLNENLRWKKEQTHWRQANEKLDKTKAELDQEALISGNLATEAHLIILDMQENIIQASSALDCKDSLLGGVLRVLVNSLNCDQSTTYLTHCFATLRALIAKFGDLLFEEEVEQCFDLCHQVLHHCSSSMDVTRSQACATLYLLMRFSFGATSNFARVKMQVTMSLASLVGRAPDFNEEHLRRSLRTILAYSEEDTAMQMTPFPTQVEELLCNLNSILYDTVKMREFQEDPEMLMDLMYRIAKSYQASPDLRLTWLQNMAEKHTKKKCYTEAAMCLVHAAALVAEYLSMLEDHSYLPVGSVSFQNISSNVLEESVVSEDTLSPDEDGVCAGQYFTESGLVGLLEQAAELFSTGGLYETVNEVYKLVIPILEAHREFRKLTLTHSKLQRAFDSIVNKDHKRMFGTYFRVGFFGSKFGDLDEQEFVYKEPAITKLPEISHRLEAFYGQCFGAEFVEVIKDSTPVDKTKLDPNKAYIQITFVEPYFDEYEMKDRVTYFEKNFNLRRFMYTTPFTLEGRPRGELHEQYRRNTVLTTMHAFPYIKTRISVIQKEEFVLTPIEVAIEDMKKKTLQLAVAINQEPPDAKMLQMVLQGSVGATVNQGPLEVAQVFLAEIPADPKLYRHHNKLRLCFKEFIMRCGEAVEKNKRLITADQREYQQELKKNYNKLKENLRPMIERKIPELYKPIFRVESQKRDSFHRSSFRKCETQLSQGS

SEQ ID NO: 241 - protein, 538 aa, Homo sapiens
MTRECPSPAPGPGAPLSGSVLAEAAVVFAVVLSIHATVWDRYSWCAVALAVQAFYVQYKWDRLLQQGSAVFQFRMSANSGLLPASMVMPLLGLVMKERCQTAGNPFFERFGIVVAATGMAVALFSSVLALGITRPVPTNTCVILGLAGGVIIYIMKHSLSVGEVIEVLEVLLIFVYLNMILLYLLPRCFTPGEALLVLGGISFVLNQLIKRSLTLVESQGDPVDFFLLVVVVGMVLMGIFFSTLFVFMDSGTWASSIFFHLMTCVLSLGVVLPWLHRLIRRNPLLWLLQFLFQTDTRIYLLAYWSLLATLACLVVLYQNAKRSSSESKKHQAPTIARKYFHLIVVATYIPGIIFDRPLLYVAATVCLAVFIFLEYVRYFRIKPLGHTLRSFLSLFLDERDSGPLILTHIYLLLGMSLPIWLIPRPCTQKGSLGGARALVPYAGVLAVGVGDTVASIFGSTMGEIRWPGTKKTFEGTMTSIFAQIISVALILIFDSGVDLNYSYAWILGSISTVSLLEAYTTQIDNLLLPLYLLILLMA

SEQ ID NO: 242 - protein, 800 aa, Homo sapiens
MTAAKQEPQPTPGARASQAQPADQELGSNSPPQRNWKGIAIALLVILVVCSLITMSVILLTPDELTNSSETRLSLEDLFRKDFVLHDPEARWINDTDVVYKSENGHVIKLNIETNATTLLLENTTFVTFKASRHSVSPDLKYVLLAYDVKQIFHYSYTASYVIYNIHTREVWELNPPEVEDSVLQYAAWGVQGQQLIYIFENNIYYQPDIKSSSLRLTSSGKEEIIFNGIADWLYEEELLHSHIAHWWSPDGERLAFLMINDSLVPTMVIPRFTGALYPKGKQYPYPKAGQVNPTIKLYVVNLYGPTHTLELMPPDSFKSREYYITMVKWVSNTKTVVRWLNRAQNISILTVCETTTGACSKKYEMTSDTWLSQQNEEPVFSRDGSKFFMTVPVKQGGRGEFHHIAMFLIQSKSEQITVRHLTSGNWEVIKILAYDETTQKIYFLSTESSPRGRQLYSASTEGLLNRQCISCNFMKEQCTYFDASFSPMNQHFLLFCEGPRVPVVSLHSTDNPAKYFILESNSMLKEAILKKKIGKPEIKILHIDDYELPLQLSLPKDFMDRNQYALLLIMDEEPGGQLVTDKFHIDWDSVLIDMDNVIVARFDGRGSGFQGLKILQEIHRRLGSVEVKDQITAVKFLLKLPYIDSKRLSIFGKGYGGYIASMILKSDEKLFKCGSVVAPITDLKLYASAFSERYLGMPSKEESTYQAASVLHNVHGLKEENILIIHGTADTKVHFQHSAELIKHLIKAGVNYTMQVYPDEGHNVSEKSKYHLYSTILKFFSDCLKEEISVLPQEPEEDE

SEQ ID NO: 243 - protein, 766 aa, Homo sapiens
MKTPWKVLLGLLGAAALVTIITVPVVLLNKGTDDATADSRKTYTLTDYLKNTYRLKLYSLRWISDHEYLYKQENNILVFNAEYGNSSVFLENSTFDEFGHSINDYSISPDGQFILLEYNYVKQWRHSYTASYDIYDLNKRQLITEERIPNNTQWVTWSPVGHKLAYVWNNDIYVKIEPNLPSYRITWTGKEDIIYNGITDWVYEEEVFSAYSALWWSPNGTFLAYAQFNDTEVPLIEYSFYSDESLQYPKTVRVPYPKAGAVNPTVKFFVVNTDSLSSVTNATSIQITAPASMLIGDHYLCDVTWATQERISLQWLRRIQNYSVMDICDYDESSGRWNCLVARQHIEMSTTGWVGRFRPSEPHFTLDGNSFYKIISNEEGYRHICYFQIDKKDCTFITKGTWEVIGIEALTSDYLYYISNEYKGMPGGRNLYKIQLSDYTKVTCLSCELNPERCQYYSVSFSKEAKYYQLRCSGPGLPLYTLHSSVNDKGLRVLEDNSALDKMLQNVQMPSKKLDFIILNETKFWYQMILPPHFDKSKKYPLLLDVYAGPCSQKADTVFRLNWATYLASTENIIVASFDGRGSGYQGDKIMHAINRRLGTFEVEDQIEAARQFSKMGFVDNKRIAIWGWSYGGYVTSMVLGSGSGVFKCGIAVAPVSRWEYYDSVYTERYMGLPTPEDNLDHYRNSTVMSRAENFKQVEYLLIHGTADDNVHFQQSAQISKALVDVGVDFQAMWYTDEDHGIASSTAHQHIYTHMSHFIKQCFSLP

SEQ ID NO: 244 - protein, 865 aa, Homo sapiens
MASLYQRFTGKINTSRSFPAPPEASHLLGGQGPEEDGGAGAKPLGPRAQAAAPRERGGGGGGAGGRPRFQYQARSDGDEEDELVGSNPPQRNWKGIAIALLVILVICSLIVTSVILLTPAEDNSLSQKKKVTVEDLFSEDFKIHDPEAKWISDTEFIYREQKGTVRLWNVETNTSTVLIEGKKIESLRAIRYEISPDREYALFSYNVEPIYQHSYTGYYVLSKIPHGDPQSLDPPEVSNAKLQYAGWGPKGQQLIFIFENNIYYCAHVGKQAIRVVSTGKEGVIYNGLSDWLYEEEILKTHIAHWWSPDGTRLAYAAINDSRVPIMELPTYTGSIYPTVKPYHYPKAGSENPSISLHVIGLNGPTHDLEMMPPDDPRMREYYITMVKWATSTKVAVTWLNRAQNVSILTLCDATTGVCTKKHEDESEAWLHRQNEEPVFSKDGRKFFFIRAIPQGGRGKFYHITVSSSQPNSSNDNIQSITSGDWDVTKILAYDEKGNKIYFLSTEDLPRRRQLYSANTVGNFNRQCLSCDLVENCTYFSASFSHSMDFFLLKCEGPGVPMVTVHNTTDKKKMFDLETNEHVKKAINDRQMPKVEYRDIEIDDYNLPMQILKPATFTDTTHYPLLLVVDGTPGSQSVAEKFEVSWETVMVSSHGAVVVKCDGRGSGFQGTKLLHEVRRRLGLLEEKDQMEAVRTMLKEQYIDRTRVAVFGKDYGGYLSTYILPAKGENQGQTFTCGSALSPITDFKLYASAFSERYLGLHGLDNRAYEMTKVAHRVSALEEQQFLIIHPTADEKIHFQHTAELITQLIRGKANYSLQIYPDESHYFTSSSLKQHLYRSIINFFVECFRIQDKLLTVTAKEDEEED

SEQ ID NO: 245 - skipped

SEQ ID NO: 246 - protein, 1025 aa, Homo sapiens
MAPVLSKDSADIESILALNPRTQTHATLCSTSAKKLDKKHWKRNPDKNCFNCEKLENNFDDIKHTTLGERGALREAMRCLKCADAPCQKSCPTNLDIKSFITSIANKNYYGAAKMIFSDNPLGLTCGMVCPTSDLCVGGCNLYATEEGPINIGGLQQFATEVFKAMSIPQIRNPSLPPPEKMSEAYSAKIALFGAGPASISCASFLARLGYSDITIFEKQEYVGGLSTSEIPQFRLPYDVVNFEIELMKDLGVKIICGKSLSVNEMTLSTLKEKGYKAAFIGIGLPEPNKDAIFQGLTQDQGFYTSKDFLPLVAKGSKAGMCACHSPLPSIRGVVIVLGAGDTAFDCATSALRCGARRVFIVFRKGFVNIRAVPEEMELAKEEKCEFLPFLSPRKVIVKGGRIVAMQFVRTEQDETGKWNEDEDQMVHLKADVVISAFGSVLSDPKVKEALSPIKFNRWGLPEVDPETMQTSEAWVFAGGDVVGLANTTVESVNDGKQASWYIHKYVQSQYGASVSAKPELPLFYTPIDLVDISVEMAGLKFINPFGLASATPATSTSMIRRAFEAGWGFALTKTFSLDKDIVTNVSPRIIRGTTSGPMYGPGQSSFLNIELISEKTAAYWCQSVTELKADFPDNIVIASIMCSYNKNDWTELAKKSEDSGADALELNLSCPHGMGERGMGLACGQDPELVRNICRWVRQAVQIPFFAKLTPNVTDIVSIARAAKEGGANGVTATNTVSGLMGLKSDGTPWPAVGIAKRTTYGGVSGTAIRPIALRAVTSIARALPGFPILATGGIDSAESGLQFLHSGASVLQVCSAIQNQDFTVIEDYCTGLKALLYLKSIEELQDWDGQSPATVSHQKGKPVPRIAELMDKKLPSFGPYLEQRKKIIAENKIRLKEQNVAFSPLKRNCFIPKRPIPTIKDVIGKALQYLGTFGELSNVEQVVAMIDEEMCINCGKCYMTCNDSGYQAIQFDPETHLPTITDTCTGCTLCLSVCPIVDCIKMVSRTTPYEPKRGVPLSVNPVC

SEQ ID NO: 247 - protein, 446 aa, Homo sapiens
MRTLNTSAMDGTGLVVERDFSVRILTACFLSLLILSTLLGNTLVCAAVIRFRHLRSKVTNFFVISLAVSDLLVAVLVMPWKAVAEIAGFWPFGSFCNIWVAFDIMCSTASILNLCVISVDRYWAISSPFRYERKMTPKAAFILISVAWTLSVLISFIPVQLSWHKAKPTSPSDGNATSLAETIDNCDSSLSRTYAISSSVISFYIPVAIMIVTYTRIYRIAQKQIRRIAALERAAVHAKNCQTTTGNGKPVECSQPESSFKMSFKRETKVLKTLSVIMGVFVCCWLPFFILNCILPFCGSGETQPFCIDSNTFDVFVWFGWANSSLNPIIYAFNADFRKAFSTLLGCYRLCPATNNAIETVSINNNGAAMFSSHHEPRGSISKECNLVYLIPHAVGSSEDLKKEEAAGIARPLEKLSPALSVILDYDTDVSLEKIQPITQNGQHPT

SEQ ID NO: 248 - protein, 443 aa, Homo sapiens
MDPLNLSWYDDDLERQNWSRPFNGSDGKADRPHYNYYATLLTLLIAVIVFGNVLVCMAVSREKALQTTTNYLIVSLAVADLLVATLVMPWVVYLEVVGEWKFSRIHCDIFVTLDVMMCTASILNLCAISIDRYTAVAMPMLYNTRYSSKRRVTVMISIVWVLSFTISCPLLFGLNNADQNECIIANPAFVVYSSIVSFYVPFIVTLLVYIKIYIVLRRRRKRVNTKRSSRAFRAHLRAPLKGNCTHPEDMKLCTVIMKSNGSFPVNRRRVEAARRAQELEMEMLSSTSPPERTRYSPIPPSHHQLTLPDPSHHGLHSTPDSPAKPEKNGHAKDHPKIAKIFEIQTMPNGKTRTSLKTMSRRKLSQQKEKKATQMLAIVLGVFIICWLPFFITHILNIHCDCNIPPVLYSAFTWLGYVNSAVNPIIYTTFNIEFRKAFLKILHC

SEQ ID NO: 249 - protein, 400 aa, Homo sapiens
MASLSQLSGHLNYTCGAENSTGASQARPHAYYALSYCALILAIVFGNGLVCMAVLKERALQTTTNYLVVSLAVADLLVATLVMPWVVYLEVTGGVWNFSRICCDVFVTLDVMMCTASILNLCAISIDRYTAVVMPVHYQHGTGQSSCRRVALMITAVWVLAFAVSCPLLFGFNTTGDPTVCSISNPDFVIYSSVVSFYLPFGVTVLVYARIYVVLKQRRRKRILTRQNSQCNSVRPGFPQQTLSPDPAHLELKRYYSICQDTALGGPGFQERGGELKREEKTRNSLSPTIAPKLSLEVRKLSNGRLSTSLKLGPLQPRGVPLREKKATQMVAIVLGAFIVCWLPFFLTHVLNTHCQTCHVSPELYSATTWLGYVNSALNPVIYTTFNIEFRKAFLKILSC

SEQ ID NO: 250 - protein, 2012 aa, Homo sapiens
MWILALSLFQSFANVFSEDLHSSLYFVNASLQEVVFASTTGTLVPCPAAGIPPVTLRWYLATGEEIYDVPGIRHVHPNGTLQIFPFPPSSFSTLIHDNTYYCTAENPSGKIRSQDVHIKAVLREPYTVRVEDQKTMRGNVAVFKCIIPSSVEAYITVVSWEKDTVSLVSGSRFLITSTGALYIKDVQNEDGLYNYRCITRHRYTGETRQSNSARLFVSDPANSAPSILDGFDHRKAMAGQRVELPCKALGHPEPDYRWLKDNMPLELSGRFQKTVTGLLIENIRPSDSGSYVCEVSNRYGTAKVIGRLYVKQPLKATISPRKVKSSVGSQVSLSCSVTGTEDQELSWYRNGEILNPGKNVRITGINHENLIMDHMVKSDGGAYQCFVRKDKLSAQDYVQVVLEDGTPKIISAFSEKVVSPAEPVSLMCNVKGTPLPTITWTLDDDPILKGGSHRISQMITSEGNVVSYLNISSSQVRDGGVYRCTANNSAGVVLYQARINVRGPASIRPMKNITAIAGRDTYIHCRVIGYPYYSIKWYKNSNLLPFNHRQVAFENNGTLKLSDVQKEVDEGEYTCNVLVQPQLSTSQSVHVTVKVPPFIQPFEFPRFSIGQRVFIPCVVVSGDLPITITWQKDGRPIPGSLGVTIDNIDFTSSLRISNLSLMHNGNYTCIARNEAAAVEHQSQLIVRVPPKFVVQPRDQDGIYGKAVILNCSAEGYPVPTIVWKFSKGAGVPQFQPIALNGRIQVLSNGSLLIKHVVEEDSGYYLCKVSNDVGADVSKSMYLTVKIPAMITSYPNTTLATQGQKKEMSCTAHGEKPIIVRWEKEDRIINPEMARYLVSTKEVGEEVISTLQILPTVREDSGFFSCHAINSYGEDRGIIQLTVQEPPDPPEIEIKDVKARTITLRWTMGFDGNSPITGYDIECKNKSDSWDSAQRTKDVSPQLNSATIIDIHPSSTYSIRMYAKNRIGKSEPSNELTITADEAAPDGPPQEVHLEPISSQSIRVTWKAPKKHLQNGIIRGYQIGYREYSTGGNFQFNIISVDTSGDSEVYTLDNLNKFTQYGLVVQACNRAGTGPSSQEIITTTLEDVPSYPPENVQAIATSPESISISWSTLSKEALNGILQGFRVIYWANLMDGELGEIKNITTTQPSLELDGLEKYTNYSIQVLAFTRAGDGVRSEQIFTRTKEDVPGPPAGVKAAAASASMVFVSWLPPLKLNGIIRKYTVFCSHPYPTVISEFEASPDSFSYRIPNLSRNRQYSVWVVAVTSAGRGNSSEIITVEPLAKAPARILTFSGTVTTPWMKDIVLPCKAVGDPSPAVKWMKDSNGTPSLVTIDGRRSIFSNGSFIIRTVKAEDSGYYSCIANNNWGSDEIILNLQVQVPPDQPRLTVSKTTSSSITLSWLPGDNGGSSIRGYILQYSEDNSEQWGSFPISPSERSYRLENLKCGTWYKFTLTAQNGVGPGRISEIIEAKTLGKEPQFSKEQELFASINTTRVRLNLIGWNDGGCPITSFTLEYRPFGTTVWTTAQRTSLSKSYILYDLQEATWYELQMRVCNSAGCAEKQANFATLNYDGSTIPPLIKSVVQNEEGLTTNEGLKMLVTISCILVGVLLLFVLLLVVRRRRREQRLKRLRDAKSLAEMLMSKNTRTSDTLSKQQQTLRMHIDIPRAQLLIEERDTMETIDDRSTVLLTDADFGEAAKQKSLTVTHTVHYQSVSQATGPLVDVSDARPGTNPTTRRNAKAGPTARNRYASQWTLNRPHPTISAHTLTTDWRLPTPRAAGSVDKESDSYSVSPSQDTDRARSSMVSTESASSTYEELARAYEHAKMEEQLRHAKFTITECFISDTSSEQLTAGTNEYTDSLTSSTPSESGICRFTASPPKPQDGGRVMNMAVPKAHRPGDLIHLPPYLRMDFLLNRGGPGTSRDLSLGQACLEPQKSRTLKRPTVLEPIPMEAASSASSTREGQSWQPGAVATLPQREGAELGQAAKMSSSQESLLDSRGHLKGNNPYAKSYTLV

SEQ ID NO: 251 - protein, 5171 aa, Homo sapiens
MHSSSYSYRSSDSVFSNTTSTRTSLDSNENLLLVHCGPTLINSCISFGSESFDGHRLEMLQQIANRVQRDSVICEDKLILAGNALQSDSKRLESGVQFQNEAEIAGYILECENLLRQHVIDVQILIDGKYYQADQLVQRVAKLRDEIMALRNECSSVYSKGRILTTEQTKLMISGITQSLNSGFAQTLHPSLTSGLTQSLTPSLTSSSMTSGLSSGMTSRLTPSVTPAYTPGFPSGLVPNFSSGVEPNSLQTLKLMQIRKPLLKSSLLDQNLTEEEINMKFVQDLLNWVDEMQVQLDRTEWGSDLPSVESHLENHKNVHRAIEEFESSLKEAKISEIQMTAPLKLTYAEKLHRLESQYAKLLNTSRNQERHLDTLHNFVSRATNELIWLNEKEEEEVAYDWSERNTNIARKKDYHAELMRELDQKEENIKSVQEIAEQLLLENHPARLTIEAYRAAMQTQWSWILQLCQCVEQHIKENTAYFEFFNDAKEATDYLRNLKDAIQRKYSCDRSSSIHKLEDLVQESMEEKEELLQYKSTIANLMGKAKTIIQLKPRNSDCPLKTSIPIKAICDYRQIEITIYKDDECVLANNSHRAKWKVISPTGNEAMVPSVCFTVPPPNKEAVDLANRIEQQYQNVLTLWHESHINMKSVVSWHYLINEIDRIRASNVASIKTMLPGEHQQVLSNLQSRFEDFLEDSQESQVFSGSDITQLEKEVNVCKQYYQELLKSAEREEQEESVYNLYISEVRNIRLRLENCEDRLIRQIRTPLERDDLHESVFRITEQEKLKKELERLKDDLGTITNKCEEFFSQAAASSSVPTLRSELNVVLQNMNQVYSMSSTYIDKLKTVNLVLKNTQAAEALVKLYETKLCEEEAVIADKNNIENLISTLKQWRSEVDEKRQVFHALEDELQKAKAISDEMFKTYKERDLDFDWHKEKADQLVERWQNVHVQIDNRLRDLEGIGKSLKYYRDTYHPLDDWIQQVETTQRKIQENQPENSKTLATQLNQQKMLVSEIEMKQSKMDECQKYAEQYSATVKDYELQTMTYRAMVDSQQKSPVKRRRMQSSADLIIQEFMDLRTRYTALVTLMTQYIKFAGDSLKRLEEEEKSLEEEKKEHVEKAKELQKWVSNISKTLKDAEKAGKPPFSKQKISSEEISTKKEQLSEALQTIQLFLAKHGDKMTDEERNELEKQVKTLQESYNLLFSESLKQLQESQTSGDVKVEEKIVAERQQEYKEKLQGICDLLTQTENRLIGHQEAFMIGDGTVELKKYQSKQEELQKDMQGSAQALAEVVKNTENFLKENGEKLSQEDKALIEQKLNEAKIKCEQLNLKAEQSKKELDKVVTTAIKEETEKVAAVKQLEESKTKIENLLDWLSNVDKDSERAGTKHKQVIEQNGTHFQEGDGKSAIGEEDEVNGNLLETDVDGQVGTTQENLNQQYQKVKAQHEKIISQHQAVIIATQSAQVLLEKQGQYLSPEEKEKLQKNMKELKVHYETALAESEKKMKLTHSLQEELEKFDADYTEFEHWLQQSEQELENLEAGADDINGLMTKLKRQKSFSEDVISHKGDLRYITISGNRVLEAAKSCSKRDGGKVDTSATHREVQRKLDHATDRFRSLYSKCNVLGNNLKDLVDKYQHYEDASCGLLAGLQACEATASKHLSEPIAVDPKNLQRQLEETKALQGQISSQQVAVEKLKKTAEVLLDARGSLLPAKNDIQKTLDDIVGRYEDLSKSVNERNEKLQITLTRSLSVQDGLDEMLDWMGNVESSLKEQGQVPLNSTALQDIISKNIMLEQDIAGRQSSINAMNEKVKKFMETTDPSTASSLQAKMKDLSARFSEASHKHKETLAKMEELKTKVELFENLSEKLQTFLETKTQALTEVDVPGKDVTELSQYMQESTSEFLEHKKHLEVLHSLLKEISSHGLPSDKALVLEKTNNLSKKFKEMEDTIKEKKEAVTSCQEQLDAFQVLVKSLKSWIKETTKKVPIVQPSFGAEDLGKSLEDTKKLQEKWSLKTPEIQKVNNSGISLCNLISAVTTPAKAIAAVKSGGAVLNGEGTATNTEEFWANKGLTSIKKDMTDISHGYEDLGLLLKDKIAELNTKLSKLQKAQEESSAMMQWLQKMNKTATKWQQTPAPTDTEAVKTQVEQNKSFEAELKQNVNKVQELKDKLTELLEENPDTPEAPRWKQMLTEIDSKWQELNQLTIDRQQKLEESSNNLTQFQTVEAQLKQWLVEKELMVSVLGPLSIDPNMLNTQRQQVQILLQEFATRKPQYEQLTAAGQGILSRPGEDPSLRGIVKEQLAAVTQKWDSLTGQLSDRCDWIDQAIVKSTQYQSLLRSLSDKLSDLDNKLSSSLAVSTHPDAMNQQLETAQKMKQEIQQEKKQIKVAQALCEDLSALVKEEYLKAELSRQLEGILKSFKDVEQKAENHVQHLQSACASSHQFQQMSRDFQAWLDTKKEEQNKSHPISAKLDVLESLIKDHKDFSKTLTAQSHMYEKTIAEGENLLLKTQGSEKAALQLQLNTIKTNWDTFNKQVKERENKLKESLEKALKYKEQVETLWPWIDKCQNNLEEIKFCLDPAEGENSIAKLKSLQKEMDQHFGMVELLNNTANSLLSVCEIDKEVVTDENKSLIQKVDMVTEQLHSKKFCLENMTQKFKEFQEVSKESKRQLQCAKEQLDIHDSLGSQAYSNKYLTMLQTQQKSLQALKHQVDLAKRLAQDLVVEASDSKGTSDVLLQVETIAQEHSTLSQQVDEKCSFLETKLQGIGHFQNTIREMFSQFAEFDDELDSMAPVGRDAETLQKQKETIKAFLKKLEALMASNDNANKTCKMMLATEETSPDLVGIKRDLEALSKQCNKLLDRAQAREEQVEGTIKRLEEFYSKLKEFSILLQKAEEHEESQGPVGMETETINQQLNMFKVFQKEEIEPLQGKQQDVNWLGQGLIQSAAKSTSTQGLEHDLDDVNARWKTLNKKVAQRAAQLQEALLHCGRFQDALESLLSWMVDTEELVANQKPPSAEFKVVKAQIQEQKLLQRLLDDRKSTVEVIKREGEKIATTAEPADKVKILKQLSLLDSRWEALLNKAETRNRQLEGISVVAQQFHETLEPLNEWLTTIEKRLVNCEPIGTQASKLEEQIAQHKALEDDIINHNKHLHQAVSIGQSLKVLSSREDKDMVQSKLDFSQVWYIEIQEKSHSRSELLQQALCNAKIFGEDEVELMNWLNEVHDKLSKLSVQDYSTEGLWKQQSELRVLQEDILLRKQNVDQALLNGLELLKQTTGDEVLIIQDKLEAIKARYKDITKLSTDVAKTLEQALQLARRLHSTHEELCTWLDKVEVELLSYETQVLKGEEASQAQMRPKELKKEAKNNKALLDSLNEVSSALLELVPWRAREGLEKMVAEDNERYRLVSDTITQKVEEIDAAILRSQQFDQAADAELSWITETEKKLMSLGDIRLEQDQTSAQLQVQKTFTMEILRHKDIIDDLVKSGHKIMTACSEEEKQSMKKKLDKVLKNYDTICQINSERYLQLERAQSLVNQFWETYEELWPWLTETQSIISQLPAPALEYETLRQQQEEHRQLRELIAEHKPHIDKMNKTGPQLLELSPGEGFSIQEKYVAADTLYSQIKEDVKKRAVALDEAISQSTQFHDKIDQILESLERIVERLRQPPSISAEVEKIKEQISENKNVSVDMEKLQPLYETLKQRGEEMIARSGGTDKDISAKAVQDKLDQMVFIWENIHTLVEEREAKLLDVMELAEKFWCDHMSLIVTIKDTQDFIRDLEDPGIDPSVVKQQQEAAETIREEIDGLQEELDIVINLGSELIAACGEPDKPIVKKSIDELNSAWDSLNKAWKDRIDKLEEAMQAAVQYQDGLQAVFDWVDIAGGKLASMSPIGTDLETVKQQIEELKQFKSEAYQQQIEMERLNHQAELLLKKVTEESDKHTVQDPLMELKLIWDSLEERIINRQHKLEGALLALGQFQHALDELLAWLTHTEGLLSEQKPVGGDPKAIEIELAKHHVLQNDVLAHQSTVEAVNKAGNDLIESSAGEEASNLQNKLEVLNQRWQNVLEKTEQRKQQLDGALRQAKGFHGEIEDLQQWLTDTERHLLASKPLGGLPETAKEQLNVHMEVCAAFEAKEETYKSLMQKGQQMLARCPKSAETNIDQDINNLKEKWESVETKLNERKTKLEEALNLAMEFHNSLQDFINWLTQAEQTLNVASRPSLILDTVLFQIDEHKVFANEVNSHREQIIELDKTGTHLKYFSQKQDVVLIKNLLISVQSRWEKVVQRLVERGRSLDDARKRAKQFHEAWSKLMEWLEESEKSLDSELEIANDPDKIKTQLAQHKEFQKSLGAKHSVYDTTNRTGRSLKEKTSLADDNLKLDDMLSELRDKWDTICGKSVERQNKLEEALLFSGQFTDALQALIDWLYRVEPQLAEDQPVHGDIDLVMNLIDNHKAFQKELGKRTSSVQALKRSARELIEGSRDDSSWVKVQMQELSTRWETVCALSISKQTRLEAALRQAEEFHSVVHALLEWLAEAEQTLRFHGVLPDDEDALRTLIDQHKEFMKKLEEKRAELNKATTMGDTVLAICHPDSITTIKHWITIIRARFEEVLAWAKQHQQRLASALAGLIAKQELLEALLAWLQWAETTLTDKDKEVIPQEIEEVKALIAEHQTFMEEMTRKQPDVDKVTKTYKRRAADPSSLQSHIPVLDKGRAGRKRFPASSLYPSGSQTQIETKNPRVNLLVSKWQQVWLLALERRRKLNDALDRLEELREFANFDFDIWRKKYMRWMNHKKSRVMDFFRRIDKDQDGKITRQEFIDGILSSKFPTSRLEMSAVADIFDRDGDGYIDYYEFVAALHPNKDAYKPITDADKIEDEVTRQVAKCKCAKRFQVEQIGDNKYRFFLGNQFGDSQQLRLVRILRSTVMVRVGGGWMALDEFLVKNDPCRAKGRTNMELREKFILADGASQGMAAFRPRGRRSRPSSRGASPNRSTSVSSQAAQAASPQVPATTTPKILHPLTRNYGKPWLTNSKMSTPCKAAECSDFPVPSAEGTPIQGSKLRLPGYLSGKGFHSGEDSGLITTAAARVRTQFADSKKTPSRPGSRAGSKAGSRASSRRGSDASDFDISEIQSVCSDVETVPQTHRPTPRAGSRPSTAKPSKIPTPQRKSPASKLDKSSKR

SEQ ID NO: 252 - protein, 235 aa, Homo sapiens
MGNGMTKVLPGLYLGNFIDAKDLDQLGRNKITHIISIHESPQPLLQDITYLRIPVADTPEVPIKKHFKECINFIHCCRLNGGNCLVHCFAGISRSTTIVTAYVMTVTGLGWRDVLEAIKATRPIANPNPGFRQQLEEFGWASSQKLRRQLEERFGESPFRDEEELRALLPLCKRCRQGSATSASSAGPHSAASEGTVQRLVPRTPREAHRPLPLLARVKQTFSCLPRCLSRKGGK

SEQ ID NO: 253 - protein, 184 aa, Homo sapiens
MGNGMNKILPGLYIGNFKDARDAEQLSKNKVTHILSVHDSARPMLEGVKYLCIPAADSPSQNLTRHFKESIKFIHECRLRGESCLVHCLAGVSRSVTLVIAYIMTVTDFGWEDALHTVRAGRSCANPNVGFQRQLQEFEKHEVHQYRQWLKEEYGESPLQDAEEAKNILAAPGILKFWAFLRRL

SEQ ID NO: 254 - protein, 670 aa, Homo sapiens
MAETKIIYHMDEEETPYLVKLPVAPERVTLADFKNVLSNRPVHAYKFFFKSMDQDFGVVKEEIFDDNAKLPCFNGRVVSWLVLAEGAHSDAGSQGTDSHTDLPPPLERTGGIGDSRPPSFHPNVASSRDGMDNETGTESMVSHRRERARRRNREEAARTNGHPRGDRRRDVGLPPDSASTALSSELESSSFVDSDEDGSTSRLSSSTEQSTSSRLIRKHKRRRRKQRLRQADRASSFSSITDSTMSLNIVTVTLNMERHHFLGISIVGQSNDRGDGGIYIGSIMKGGAVAADGRIEPGDMLLQVNDVNFENMSNDDAVRVLREIVSQTGPISLTVAKCWDPTPRSYFTVPRADPVRPIDPAAWLSHTAALTGALPRYELEEAPLTVKSDMSAVVRVMQLPDSGLEIRDRMWLKITIANAVIGADVVDWLYTHVEGFKERREARKYASSLLKHGFLRHTVNKITFSEQCYYVFGDLCSNLATLNLNSGSSGTSDQDTLAPLPHPAAPWPLGQGYPYQYPGPPPCFPPAYQDPGFSYGSGSTGSQQSEGSKSSGSTRSSRRAPGREKERRAAGAGGSGSESDHTAPSGVGSSWRERPAGQLSRGSSPRSQASATAPGLPPPHPTTKAYTVVGGPPGGPPVRELAAVPPELTGSRQSFQKAMGNPCEFFVDIM

SEQ ID NO: 255 - protein, 716 aa, Homo sapiens
MGETKIIYHLDGQETPYLVKLPLPAERVTLADFKGVLQRPSYKFFFKSMDDDFGVVKEEISDDNAKLPCFNGRVVSWLVSAEGSHPDPAPFCADNPSELPPPMERTGGIGDSRPPSFHPHAGGGSQENLDNDTETDSLVSAQRERPRRRDGPEHATRLNGTAKGERRREPGGYDSSSTLMSSELETTSFFDSDEDDSTSRFSSSTEQSSASRLMRRHKRRRRKQKVSRIERSSSFSSITDSTMSLNIITVTLNMEKYNFLGISIVGQSNERGDGGIYIGSIMKGGAVAADGRIEPGDMLLQVNEINFENMSNDDAVRVLREIVHKPGPITLTVAKCWDPSPRGCFTLPRSEPIRPIDPAAWVSHTAAMTGTFPAYGMSPSLSTITSTSSSITSSIPDTERLDDFHLSIHSDMAAIVKAMASPESGLEVRDRMWLKITIPNAFIGSDVVDWLYHNVEGFTDRREARKYASNLLKAGFIRHTVNKITFSEQCYYIFGDLCGNMANLSLHDHDGSSGASDQDTLAPLPHPGAAPWPMAFPYQYPPPPHPYNPHPGFPELGYSYGGGSASSQHSEGSRSSGSNRSGSDRRKEKDPKAGDSKSGGSGSESDHTTRSSLRGPRERAPSERSGPAASEHSHRSHHSLASSLRSHHTHPSYGPPGVPPLYGPPMLMMPPPPAAMGPPGAPPGRDLASVPPELTASRQSFRMAMGNPSEFFVDVM

SEQ ID NO: 256 - protein, 177 aa, Homo sapiens
MESIYLQKHLGACLTQGLAEVARVRPVDPIEYLALWIYKYKENVTMEQLRQKEMAKLERERELALMEQEMMERLKAEELLLQQQQLALQLELEMQEKERQRIQELQRAQEQLGKEMRMNMENLVRNEDILHSEEATLDSGKTLAEISDRYGAPNLSRVEELDEPMFSDIALNIDQDL

SEQ ID NO: 257 - protein, 191 aa, Homo sapiens
MILRPPQQCGTAARMETNYLKRCFGNCLAQALAEVAKVRPSDPIEYLAHWLYHYRKTAKAKEENREKKIHLQEEYDSSLKEMEMTEMLKQEEYQIQQNCEKCHKELTSETVSTKKTIFMQEDTNPLEKEALKQEFLPGTSSLIPGMPQQVPPSESAGQIDQNFKMPQEINYKEAFQHEVAHEMPPGSKSPF

SEQ ID NO: 258 - protein, 763 aa, Homo sapiens
MHTGGETSACKPSSVRLAPSFSFHAAGLQMAGQMPHSHQYSDRRQPNISDQQVSALSYSDQIQQPLTNQVMPDIVMLQRRMPQTFRDPATAPLRKLSVDLIKTYKHINEVYYAKKKRRHQQGQGDDSSHKKERKVYNDGYDDDNYDYIVKNGEKWMDRYEIDSLIGKGSFGQVVKAYDRVEQEWVAIKIIKNKKAFLNQAQIEVRLLELMNKHDTEMKYYIVHLKRHFMFRNHLCLVFEMLSYNLYDLLRNTNFRGVSLNLTRKFAQQMCTALLFLATPELSIIHCDLKPENILLCNPKRSAIKIVDFGSSCQLGQRIYQYIQSRFYRSPEVLLGMPYDLAIDMWSLGCILVEMHTGEPLFSGANEVDQMNKIVEVLGIPPAHILDQAPKARKFFEKLPDGTWNLKKTKDGKREYKPPGTRKLHNILGVETGGPGGRRAGESGHTVADYLKFKDLILRMLDYDPKTRIQPYYALQHSFFKKTADEGTNTSNSVSTSPAMEQSQSSGTTSSTSSSSGGSSGTSNSGRARSDPTHQHRHSGGHFTAAVQAMDCETHSPQVRQQFPAPLGWSGTEAPTQVTVETHPVQETTFHVAPQQNALHHHHGNSSHHHHHHHHHHHHHGQQALGNRTRPRVYNSPTNSSSTQDSMEVGHSHHSMTSLSSSTTSSSTSSSSTGNQGNQAYQNRPVAANTLDFGQNGAMDVNLTVYSNPRQETGIAGHPTYQFSANTGPAHYMTEGHLTMRQGADREESPMTGVCVQQSPVASS

SEQ ID NO: 259 - protein, 463 aa, Homo sapiens
MGKEKTHINIVVIGHVDSGKSTTTGHLIYKCGGIDKRTIEKFEKEAAEMGKGSFKYAWVLDKLKAERERGITIDISLWKFETTKYYITIIDAPGHRDFIKNMITGTSQADCAVLIVAAGVGEFEAGISKNGQTREHALLAYTLGVKQLIVGVNKMDSTEPAYSEKRYDEIVKEVSAYIKKIGYNPATVPFVPISGWHGDNMLEPSPNMPWFKGWKVERKEGNASGVSLLEALDTILPPTRPTDKPLRLPLQDVYKIGGIGTVPVGRVETGILRPGMVVTFAPVNITTEVKSVEMHHEALSEALPGDNVGFNVKNVSVKDIRRGNVCGDSKSDPPQEAAQFTSQVIILNHPGQISAGYSPVIDCHTAHIACKFAELKEKIDRRSGKKLEDNPKSLKSGDAAIVEMVPGKPMCVESFSQYPPLGRFAVRDMRQTVAVGVIKNVEKKSGGAGKVTKSAQKAQKAGK

SEQ ID NO: 260 - protein, 821 aa, Homo sapiens
MPTRVCCCCSALRPRYKRLVDNIFPEDPKDGLVKTDMEKLTFYAVSAPEKLDRIGSYLAERLSRDVVRHRSGYVLIAMEALDQLLMACHSQSIKPFVESFLHMVAKLLESGEPKLQVLGTNSFVKFANIEEDTPSYHRRYDFFVSRFSAMCHSCHSDPEIRTEIRIAGIRGIQGVVRKTVNDELRATIWEPQHMDKIVPSLLFNMQKIEEVDSRIGPPSSPSATDKEENPAVLAENCFRELLGRATFGNMNNAVRPVFAHLDHHKLWDPNEFAVHCFKIIMYSIQAQYSHHVIQEILGHLDARKKDAPRVRAGIIQVLLEAVAIAAKGSIGPTVLEVFNTLLKHLRLSVEFEANDLQGGSVGSVNLNTSSKDNDEKIVQNAIIQTIGFFGSNLPDYQRSEIMMFIMGKVPVFGTSTHTLDISQLGDLGTRRIQIMLLRSLLMVTSGYKAKTIVTALPGSFLDPLLSPSLMEDYELRQLVLEVMHNLMDRHDNRAKLRGIRIIPDVADLKIKREKICRQDTSFMKKNGQQLYRHIYLGCKEEDNVQKNYELLYTSLALITIELANEEVVIDLIRLAIALQDSAIINEDNLPMFHRCGIMALVAAYLNFVSQMIAVPAFCQHVSKVIEIRTMEAPYFLPEHIFRDKCMLPKSLEKHEKDLYFLTNKIAESLGGSGYSVERLSVPYVPQVTDEDRLSRRKSIVDTVSIQVDILSNNVPSDDVVSNTEEITFEALKKAIDTSGMEEQEKEKRRLVIEKFQKAPFEEIAAQCESKANLLHDRLAQILELTIRPPPSPSGTLTITSGHAQYQSVPVYEMKFPDLCVY

SEQ ID NO: 261 - protein, 476 aa, Homo sapiens
MMTAKAVDKIPVTLSGFVHQLSDNIYPVEDLAATSVTIFPNAELGGPFDQMNGVAGDGMINIDMTGEKRSLDLPYPSSFAPVSAPRNQTFTYMGKFSIDPQYPGASCYPEGIINIVSAGILQGVTSPASTTASSSVTSASPNPLATGPLGVCTMSQTQPDLDHLYSPPPPPPPYSGCAGDLYQDPSAFLSAATTSTSSSLAYPPPPSYPSPKPATDPGLFPMIPDYPGFFPSQCQRDLHGTAGPDRKPFPCPLDTLRVPPPLTPLSTIRNFTLGGPSAGVTGPGASGGSEGPRLPGSSSAAAAAAAAAAYNPHHLPLRPILRPRKYPNRPSKTPVHERPYPCPAEGCDRRFSRSDELTRHIRIHTGHKPFQCRICMRNFSRSDHLTTHIRTHTGEKPFACDYCGRKFARSDERKRHTKIHLRQKERKSSAPSASVPAPSTASCSGGVQPGGTLCSSNSSSLGGGPLAPCSSRTRTP

SEQ ID NO: 262 - protein, 1298 aa, Homo sapiens
MAAADAEAVPARGEPQQDCCVKTELLGEETPMAADEGSAEKQAGEAHMAADGETNGSCENSDASSHANAAKHTQDSARVNPQDGTNTLTRIAENGVSERDSEAAKQNHVTADDFVQTSVIGSNGYILNKPALQAQPLRTTSTLASSLPGHAAKTLPGGAGKGRTPSAFPQTPAAPPATLGEGSADTEDRKLPAPGADVKVHRARKTMPKSVVGLHAASKDPREVREARDHKEPKEEINKNISDFGRQQLLPPFPSLHQSLPQNQCYMATTKSQTACLPFVLAAAVSRKKKRRMGTYSLVPKKKTKVLKQRTVIEMFKSITHSTVGSKGEKDLGASSLHVNGESLEMDSDEDDSEELEEDDGHGAEQAAAFPTEDSRTSKESMSEADRAQKMDGESEEEQESVDTGEEEEGGDESDLSSESSIKKKFLKRKGKTDSPWIKPARKRRRRSRKKPSGALGSESYKSSAGSAEQTAPGDSTGYMEVSLDSLDLRVKGILSSQAEGLANGPDVLETDGLQEVPLCSCRMETPKSREITTLANNQCMATESVDHELGRCTNSVVKYELMRPSNKAPLLVLCEDHRGRMVKHQCCPGCGYFCTAGNFMECQPESSISHRFHKDCASRVNNASYCPHCGEESSKAKEVTIAKADTTSTVTPVPGQEKGSALEGRADTTTGSAAGPPLSEDDKLQGAASHVPEGFDPTGPAGLGRPTPGLSQGPGKETLESALIALDSEKPKKLRFHPKQLYFSARQGELQKVLLMLVDGIDPNFKMEHQNKRSPLHAAAEAGHVDICHMLVQAGANIDTCSEDQRTPLMEAAENNHLEAVKYLIKAGALVDPKDAEGSTCLHLAAKKGHYEVVQYLLSNGQMDVNCQDDGGWTPMIWATEYKHVDLVKLLLSKGSDINIRDNEENICLHWAAFSGCVDIAEILLAAKCDLHAVNIHGDSPLHIAARENRYDCVVLFLSRDSDVTLKNKEGETPLQCASLNSQVWSALQMSKALQDSAPDRPSPVERIVSRDIARGYERIPIPCVNAVDSEPCPSNYKYVSQNCVTSPMNIDRNITHLQYCVCIDDCSSSNCMCGQLSMRCWYDKDGRLLPEFNMAEPPLIFECNHACSCWRNCRNRVVQNGLRARLQLYRTRDMGWGVRSLQDIPPGTFVCEYVGELISDSEADVREEDSYLFDLDNKDGEVYCIDARFYGNVSRFINHHCEPNLVPVRVFMAHQDLRFPRIAFFSTRLIEAGEQLGFDYGERFWDIKGKLFSCRCGSPKCRHSSAALAQRQASAAQEAQEDGLPDTSSAAAADPL

SEQ ID NO: 263 - protein, 320 aa, Homo sapiens
MPTGDFDSKPSWADQVEEEGEDDKCVTSELLKGIPLATGDTSPEPELLPGAPLPPPKEVINGNIKTVTEYKIDEDGKKFKIVRTFRIETRKASKAVARRKNWKKFGNSEFDPPGPNVATTTVSDDVSMTFITSKEDLNCQEEEDPMNKLKGQKIVSCRICKGDHWTTRCPYKDTLGPMQKELAEQLGLSTGEKEKLPGELEPVQATQNKTGKYVPPSLRDGASRRGESMQPNRRADDNATIRVTNLSEDTRETDLQELFRPFGSISRIYLAKDKTTGQSKGFAFISFHRREDAARAIAGVSGFGYDHLILNVEWAKPSTN

SEQ ID NO: 264 - protein, 248 aa, Homo sapiens
MATVEPETTPTPNPPTTEEEKTESNQEVANPEHYIKHPLQNRWALWFFKNDKSKTWQANLRLISKFDTVEDFWALYNHIQLSSNLMPGCDYSLFKDGIEPMWEDEKNKRGGRWLITLNKQQRRSDLDRFWLETRWDLAMLPRLVSNFWPQVILPLQPPKVLELQLLCLIGESFDDYSDDVCGAVVNVRAKGDKIAIWTTECENREAVTHIGRVYKERLGLPPKIVIGYQSHADTATKSGSTTKNRFVV

SEQ ID NO: 265 - protein, 120 aa, Homo sapiens
MSSSAGSGHQPSQSRAIPTRTVAISDAAQLPHDYCTTPGGTLFSTTPGGTRIIYDRKFLLDRRNSPMAQTPPCHLPNIPGVTSPGTLIEDSKVEVNNLNNLNNHDRKHAVGDDAQFEMDI

SEQ ID NO: 266 - protein, 359 aa, Homo sapiens
METQLSNGPTCNNTANGPTTINNNCSSPVDSGNTEDSKTNLIVNYLPQNMTQEELKSLFGSIGEIESCKLVRDKITGQSLGYGFVNYIDPKDAEKAINTLNGLRLQTKTIKVSYARPSSASIRDANLYVSGLPKTMTQKELEQLFSQYGRIITSRILVDQVTGISRGVGFIRFDKRIEAEEAIKGLNGQKPPGATEPITVKFANNPSQKTNQAILSQLYQSPNRRYPGPLAQQAQRFRLDNLLNMAYGVKRFSPMTIDGMTSLAGINIPGHPGTGWCIFVYNLAPDADESILWQMFGPFGAVTNVKVIRDFNTNKCKGFGFVTMTNYDEAAMAIASLNGYRLGDRVLQVSFKTNKTHKA

SEQ ID NO: 267 - protein, 367 aa, Homo sapiens
MVTQILGAMESQVGGGPAGPALPNGPLLGTNGATDDSKTNLIVNYLPQNMTQDEFKSLFGSIGDIESCKLVRDKITGQSLGYGFVNYSDPNDADKAINTLNGLKLQTKTIKVSYARPSSASIRDANLYVSGLPKTMSQKEMEQLFSQYGRIITSRILVDQVTGVSRGVGFIRFDKRIEAEEAIKGLNGQKPLGAAEPITVKFANNPSQKTGQALLTHLYQSSARRYAGPLHHQTQRFRLDNLLNMAYGVKSPLSLIARFSPIAIDGMSGLAGVGLSGGAAGAGWCIFVYNLSPEADESVLWQLFGPFGAVTNVKVIRDFTTNKCKGFGFVTMTNYDEAAMAIASLNGYRLGERVLQVSFKTSKQHKA

SEQ ID NO: 268 - protein, 424 aa, Homo sapiens
MAAVATCGSVAASTGSAVATASKSNVTSFQRRGPRASVTNDSGPRLVSIAGTRPSVRNGQLLVSTGLPALDQLLGGGLAVGTVLLIEEDKYNIYSPLLFKYFLAEGIVNGHTLLVASAKEDPANILQELPAPLLDDKCKKEFDEDVYNHKTPESNIKMKIAWRYQLLPKMEIGPVSSSRFGHYYDASKRMPQELIEASNWHGFFLPEKISSTLKVEPCSLTPGYTKLLQFIQNIIYEEGFDGSNPQKKQRNILRIGIQNLGSPLWGDDICCAENGGNSHSLTKFLYVLRGLLRTSLSACIITMPTHLIQNKAIIARVTTLSDVVVGLESFIGSERETNPLYKDYHGLIHIRQIPRLNNLICDESDVKDLAFKLKRKLFTIERLHLPPDLSDTVSRSSKMDLAESAKRLGPGCGMMAGGKKHLDF

SEQ ID NO: 269 - protein, 834 aa, Homo sapiens
MEDGFSSYSSLYDTSSLLQFCNDDSASAASSMEVTDRIASLEQRVQMQEDDIQLLKSALADVVRRLNITEEQQAVLNRKGPTKARPLMQTLPLRTTVNNGTVLPKKPTGSLPSPSGVRKETAVPATKRLNRSVSLLNACKLNRSTPSNIKRTSSSERVSPGGRRESNGDSRGNRNRTGSTSSSSSGKKNSESKPKEPVFSAEEGYVKMFLRGRPVTMYMPKDQVDSYSLEAKVELPTKRLKLEWVYGYRGRDCRNNLYLLPTGETVYFIASVVVLYNVEEQLQRHYAGHNDDVKCLAVHPDRITIATGQVAGTSKDGKQLPPHVRIWDSVTLNTLHVIGIGFFDRAVTCIAFSKSNGGTNLCAVDDSNDHVLSVWDWQKEEKLADVKCSNEAVFAADFHPTDTNIIVTCGKSHLYFWTLEGSSLNKKQGLFEKQEKPKFVLCVTFSENGDTITGDSSGNILVWGKGTNRISYAVQGAHEGGIFALCMLRDGTLVSGGGKDRKLISWSGNYQKLRKTEIPEQFGPIRTVAEGKGDVILIGTTRNFVLQGTLSGDFTPITQGHTDELWGLAIHASKSQFLTCGHDKHATLWDAVGHRPVWDKIIEDPAQSSGFHPSGSVVAVGTLTGRWFVFDTETKDLVTVHTDGNEQLSVMRYSPDGNFLAIGSHDNCIYIYGVSDNGRKYTRVGKCSGHSSFITHLDWSVNSQFLVSNSGDYEILYWVPSACKQVVSVETTRDIEWATYTCTLGFHVFGVWPEGSDGTDINAVCRAHEKKLLSTGDDFGKVHLFSYPCSQFRAPSHIYGGHSSHVTNVDFLCEDSHLISTGGKDTSIMQWRVI

SEQ ID NO: 270 - protein, 333 aa, Homo sapiens
MEENDPKPGEAAAAVEGQRQPESSPGGGSGGGGGSSPGEADTGRRRALMLPAVLQAPGNHQHPHRITNFFIDNILRPEFGRRKDAGTCCAGAGGGRGGGAGGEGGASGAEGGGGAGGSEQLLGSGSREPRQNPPCAPGAGGPLPAAGSDSPGDGEGGSKTLSLHGGAKKGGDPGGPLDGSLKARGLGGGDLSVSSDSDSSQAGANLGAQPMLWPAWVYCTRYSDRPSSGPRSRKPKKKNPNKEDKRPRTAFTAEQLQRLKAEFQTNRYLTEQRRQSLAQELSLNESQIKIWFQNKRAKIKKATGNKNTLAVHLMAQGLYNHSTTAKEGKSDSE

SEQ ID NO: 271 - protein, 2414 aa, Homo sapiens
MAENVVEPGPPSAKRPKLSSPALSASASDGTDFGSLFDLEHDLPDELINSTELGLTNGGDINQLQTSLGMVQDAASKHKQLSELLRSGSSPNLNMGVGGPGQVMASQAQQSSPGLGLINSMVKSPMTQAGLTSPNMGMGTSGPNQGPTQSTGMMNSPVNQPAMGMNTGMNAGMNPGMLAAGNGQGIMPNQVMNGSIGAGRGRQNMQYPNPGMGSAGNLLTEPLQQGSPQMGGQTGLRGPQPLKMGMMNNPNPYGSPYTQNPGQQIGASGLGLQIQTKTVLSNNLSPFAMDKKAVPGGGMPNMGQQPAPQVQQPGLVTPVAQGMGSGAHTADPEKRKLIQQQLVLLLHAHKCQRREQANGEVRQCNLPHCRTMKNVLNHMTHCQSGKSCQVAHCASSRQIISHWKNCTRHDCPVCLPLKNAGDKRNQQPILTGAPVGLGNPSSLGVGQQSAPNLSTVSQIDPSSIERAYAALGLPYQVNQMPTQPQVQAKNQQNQQPGQSPQGMRPMSNMSASPMGVNGGVGVQTPSLLSDSMLHSAINSQNPMMSENASVPSLGPMPTAAQPSTTGIRKQWHEDITQDLRNHLVHKLVQAIFPTPDPAALKDRRMENLVAYARKVEGDMYESANNRAEYYHLLAEKIYKIQKELEEKRRTRLQKQNMLPNAAGMVPVSMNPGPNMGQPQPGMTSNGPLPDPSMIRGSVPNQMMPRITPQSGLNQFGQMSMAQPPIVPRQTPPLQHHGQLAQPGALNPPMGYGPRMQQPSNQGQFLPQTQFPSQGMNVTNIPLAPSSGQAPVSQAQMSSSSCPVNSPIMPPGSQGSHIHCPQLPQPALHQNSPSPVPSRTPTPHHTPPSIGAQQPPATTIPAPVPTPPAMPPGPQSQALHPPPRQTPTPPTTQLPQQVQPSLPAAPSADQPQQQPRSQQSTAASVPTPTAPLLPPQPATPLSQPAVSIEGQVSNPPSTSSTEVNSQAIAEKQPSQEVKMEAKMEVDQPEPADTQPEDISESKVEDCKMESTETEERSTELKTEIKEEEDQPSTSATQSSPAPGQSKKKIFKPEELRQALMPTLEALYRQDPESLPFRQPVDPQLLGIPDYFDIVKSPMDLSTIKRKLDTGQYQEPWQYVDDIWLMFNNAWLYNRKTSRVYKYCSKLSEVFEQEIDPVMQSLGYCCGRKLEFSPQTLCCYGKQLCTIPRDATYYSYQNRYHFCEKCFNEIQGESVSLGDDPSQPQTTINKEQFSKRKNDTLDPELFVECTECGRKMHQICVLHHEIIWPAGFVCDGCLKKSARTRKENKFSAKRLPSTRLGTFLENRVNDFLRRQNHPESGEVTVRVVHASDKTVEVKPGMKARFVDSGEMAESFPYRTKALFAFEEIDGVDLCFFGMHVQEYGSDCPPPNQRRVYISYLDSVHFFRPKCLRTAVYHEILIGYLEYVKKLGYTTGHIWACPPSEGDDYIFHCHPPDQKIPKPKRLQEWYKKMLDKAVSERIVHDYKDIFKQATEDRLTSAKELPYFEGDFWPNVLEESIKELEQEEEERKREENTSNESTDVTKGDSKNAKKKNNKKTSKNKSSLSRGNKKKPGMPNVSNDLSQKLYATMEKHKEVFFVIRLIAGPAANSLPPIVDPDPLIPCDLMDGRDAFLTLARDKHLEFSSLRRAQWSTMCMLVELHTQSQDRFVYTCNECKHHVETRWHCTVCEDYDLCITCYNTKNHDHKMEKLGLGLDDESNNQQAAATQSPGDSRRLSIQRCIQSLVHACQCRNANCSLPSCQKMKRVVQHTKGCKRKTNGGCPICKQLIALCCYHAKHCQENKCPVPFCLNIKQKLRQQQLQHRLQQAQMLRRRMASMQRTGVVGQQQGLPSPTPATPTTPTGQQPTTPQTPQPTSQPQPTPPNSMPPYLPRTQAAGPVSQGKAAGQVTPPTPPQTAQPPLPGPPPAAVEMAMQIQRAAETQRQMAHVQIFQRPIQHQMPPMTPMAPMGMNPPPMTRGPSGHLEPGMGPTGMQQQPPWSQGGLPQPQQLQSGMPRPAMMSVAQHGQPLNMAPQPGLGQVGISPLKPGTVSQQALQNLLRTLRSPSSPLQQQQVLSILHANPQLLAAFIKQRAAKYANSNPQPIPGQPGMPQGQPGLQPPTMPGQQGVHSNPAMQNMNPMQAGVQRAGLPQQQPQQQLQPPMGGMSPQAQQMNMNHNTMPSQFRDILRRQQMMQQQQQQGAGPGIGPGMANHNQFQQPQGVGYPPQQQQRMQHHMQQMQQGNMGQIGQLPQALGAEAGASLQAYQQRLLQQQMGSPVQPNPMSPQQHMLPNQAQSPHLQGQQIPNSLSNQVRSPQPVPSPRPQSQPPHSSPSPRMQPQPSPHHVSPQTSSPHPGLVAAQANPMEQGHFASPDQNSMLSQLASNPGMANLHGASATDLGLSTDNSDLNSNLSQSTLDIH

SEQ ID NO: 272 - protein, 3123 aa, Homo sapiens
MHHGTGPQNVQHQLQRSRACPGSEGEEQPAHPNPPPSPAAPFAPSASPSAPQSPSYQIQQLMNRSPATGQNVNITLQSVGPVVGGNQQITLAPLPLPSPTSPGFQFSAQPRRFEHGSPSYIQVTSPLSQQVQTQSPTQPSPGPGQALQNVRAGAPGPGLGLCSSSPTGGFVDASVLVRQISLSPSSGGHFVFQDGSGLTQIAQGAQVQLQHPGTPITVRERRPSQPHTQSGGTIHHLGPQSPAAAGGAGLQPLASPSHITTANLPPQISSIIQGQLVQQQQVLQGPPLPRPLGFERTPGVLLPGAGGAAGFGMTSPPPPTSPSRTAVPPGLSSLPLTSVGNTGMKKVPKKLEEIPPASPEMAQMRKQCLDYHYQEMQALKEVFKEYLIELFFLQHFQGNMMDFLAFKKKHYAPLQAYLRQNDLDIEEEEEEEEEEEEKSEVINDEQQALAGSLVAGAGSTVETDLFKRQQAMPSTGMAEQSKRPRLEVGHQGVVFQHPGADAGVPLQQLMPTAQGGMPPTPQAAQLAGQRQSQQQYDPSTGPPVQNAASLHTPLPQLPGRLPPAGVPTAALSSALQFAQQPQVVEAQTQLQIPVKTQQPNVPIPAPPSSQLPIPPSQPAQLALHVPTPGKVQVQASQLSSLPQMVASTRLPVDPAPPCPRPLPTSSTSSLAPVSGSGPGPSPARSSPVNRPSSATNKALSPVTSRTPGVVASAPTKPQSPAQNATSSQDSSQDTLTEQITLENQVHQRIAELRKAGLWSQRRLPKLQEAPRPKSHWDYLLEEMQWMATDFAQERRWKVAAAKKLVRTVVRHHEEKQLREERGKKEEQSRLRRIAASTAREIECFWSNIEQVVEIKLRVELEEKRKKALNLQKVSRRGKELRPKGFDALQESSLDSGMSGRKRKASISLTDDEVDDEEETIEEEEANEGVVDHQTELSNLAKEAELPLLDLMKLYEGAFLPSSQWPRPKPDGEDTSGEEDADDCPGDRESRKDLVLIDSLFIMDQFKAAERMNIGKPNAKDIADVTAVAEAILPKGSARVTTSVKFNAPSLLYGALRDYQKIGLDWLAKLYRKNLNGILADEAGLGKTVQIIAFFAHLACNEGNWGPHLVVVRSCNILKWELELKRWCPGLKILSYIGSHRELKAKRQEWAEPNSFHVCITSYTQFFRGLTAFTRVRWKCLVIDEMQRVKGMTERHWEAVFTLQSQQRLLLIDSPLHNTFLELWTMVHFLVPGISRPYLSSPLRAPSEESQDYYHKVVIRLHRVTQPFILRRTKRDVEKQLTKKYEHVLKCRLSNRQKALYEDVILQPGTQEALKSGHFVNVLSILVRLQRICNHPGLVEPRHPGSSYVAGPLEYPSASLILKALERDFWKEADLSMFDLIGLENKITRHEAELLSKKKIPRKLMEEISTSAAPAARPAAAKLKASRLFQPVQYGQKPEGRTVAFPSTHPPRTAAPTTASAAPQGPLRGRPPIATFSANPEAKAAAAPFQTSQASASAPRHQPASASSTAASPAHPAKLRAQTTAQASTPGQPPPQPQAPSHAAGQSALPQRLVLPSQAQARLPSGEVVKIAQLASITGPQSRVAQPETPVTLQFQGSKFTLSHSQLRQLTAGQPLQLQGSVLQIVSAPGQPYLRAPGPVVMQTVSQAGAVHGALGSKPPAGGPSPAPLTPQVGVPGRVAVNALAVGEPGTASKPASPIGGPTQEEKTRLLKERLDQIYLVNERRCSQAPVYGRDLLRICALPSHGRVQWRGSLDGRRGKEAGPAHSYTSSSESPSELMLTLCRCGESLQDVIDRVAFVIPPVVAAPPSLRVPRPPPLYSHRMRILRQGLREHAAPYFQQLRQTTAPRLLQFPELRLVQFDSGKLEALAILLQKLKSEGRRVLILSQMILMLDILEMFLNFHYLTYVRIDENASSEQRQELMRSFNRDRRIFCAILSTHSRTTGINLVEADTVVFYDNDLNPVMDAKAQEWCDRIGRCKDIHIYRLVSGNSIEEKLLKNGTKDLIREVAAQGNDYSMAFLTQRTIQELFEVYSPMDDAGFPVKAEEFVVLSQEPSVTETIAPKIARPFIEALKSIEYLEEDAQKSAQEGVLGPHTDALSSDSENMPCDEEPSQLEELADFMEQLTPIEKYALNYLELFHTSIEQEKERNSEDAVMTAVRAWEFWNLKTLQEREARLRLEQEEAELLTYTREDAYSMEYVYEDVDGQTEVMPLWTPPTPPQDDSDIYLDSVMCLMYEATPIPEAKLPPVYVRKERKRHKTDPSAAGRKKKQRHGEAVVPPRSLFDRATPGLLKIRREGKEQKKNILLKQQVPFAKPLPTFAKPTAEPGQDNPEWLISEDWALLQAVKQLLELPLNLTIVSPAHTPNWDLVSDVVNSCSRIYRSSKQCRNRYENVIIPREEGKSKNNRPLRTSQIYAQDENATHTQLYTSHFDLMKMTAGKRSPPIKPLLGMNPFQKNPKHASVLAESGINYDKPLPPIQVASLRAERIAKEKKALADQQKAQQPAVAQPPPPQPQPPPPPQQPPPPLPQPQAAGSQPPAGPPAVQPQPQPQPQTQPQPVQAPAKAQPAITTGGSAAVLAGTIKTSVTGTSMPTGAVSGNVIVNTIAGVPAATFQSINKRLASPVAPGALTTPGGSAPAQVVHTQPPPRAVGSPATATPDLVSMATTQGVRAVTSVTASAVVTTNLTPVQTPARSLVPQVSQATGVQLPGKTITPAHFQLLRQQQQQQQQQQQQQQQQQQQQQQQQQQQQQTTTTSQVQVPQIQGQAQSPAQIKAVGKLTPEHLIKMQKQKLQMPPQPPPPQAQSAPPQPTAQVQVQTSQPPQQQSPQLTTVTAPRPGALLTGTTVANLQVARLTRVPTSQLQAQGQMQTQAPQPAQVALAKPPVVSVPAAVVSSPGVTTLPMNVAGISVAIGQPQKAAGQTVVAQPVHMQQLLKLKQQAVQQQKAIQPQAAQGPAAVQQKITAQQITTPGAQQKVAYAAQPALKTQFLTTPISQAQKLAGAQQVQTQIQVAKLPQVVQQQTPVASIQQVASASQQASPQTVALTQATAAGQQVQMIPAVTATAQVVQQKLIQQQVVTTASAPLQTPGAPNPAQVPASSDSPSQQPKLQMRVPAVRLKTPTKPPCQ

SEQ ID NO: 273 - protein, 807 aa, Homo sapiens
MSKLSFRARALDAAKPLPIYRGKDMPDLNDCVSINRAVPQMPTGMEKEEESEHHLQRAISAQQVFREKKESMVIPVPEAESNVNYYNRLYKGEFKQPKQFIHIQPFNLDNEQPDYDMDSEDETLLNRLNRKMEIKPLQFEIMIDRLEKASSNQLVTLQEAKLLLNEDDYLIKAVYDYWVRKRKNCRGPSLIPQIKQEKRDGSTNNDPYVAFRRRTEKMQTRKNRKNDEASYEKMLKLRREFSRAITILEMIKRREKTKRELLHLTLEVVEKRYHLGDYGGEILNEVKISRSEKELYATPATLHNGNHHKVQECKTKHPHHLSLKEEASDVVRQKKKYPKKPKAEALITSQQPTPETLPVINKSDIKQYDFHSSDEDEFPQVLSPVSEPEEENDPDGPCAFRRRAGCQYYAPRLDQANHSCENSELADLDKLRYRHCLTTLTVPRRCIGFARRRIGRGGRVIMDRISTEHDPVLKQIDPEMLNSFSSSSQTIDFSSNFSRTNASSKHCENRLSLSEILSNIRSCRLQCFQPRLLNLQDSDSEECTSRKPGQTVNNKRVSAASVALLNTSKNGISVTGGITEEQFQTHQQQLVQMQRQQLAQLQQKQQSQHSSQQTHPKAQGSSTSDCMSKTLDSASAHFAASAVVSAPVPSRSEVAKEQNTGHNNINGVVQPSGTSKTLYSTNMALSSSPGISAVQLVRTVGHTTTNHLIPALCTSSPQTLPMNNSCLTNAVHLNNVSVVSPVNVHINTRTSAPSPTALKLATVAASMDRVPKVTPSSAISSIARENHEPERLGLNGIAETTVAMEVT

SEQ ID NO: 274 - protein, 1130 aa, Homo sapiens
MQFPSPPAARSSPAPQAASSSEAAAPATGQPGPSCPVPGTSRRGRPGTPPAGRVEEEEEEEEEDVDKDPHPTQNTCLRCRHFSLRERKREPRRTMGGCEVREFLLQFGFFLPLLTAWPGDCSHVSNNQVVLLDTTTVLGELGWKTYPLNGWDAITEMDEHNRPIHTYQVCNVMEPNQNNWLRTNWISRDAAQKIYVEMKFTLRDCNSIPWVLGTCKETFNLFYMESDESHGIKFKPNQYTKIDTIAADESFTQMDLGDRILKLNTEIREVGPIERKGFYLAFQDIGACIALVSVRVFYKKCPFTVRNLAMFPDTIPRVDSSSLVEVRGSCVKSAEERDTPKLYCGADGDWLVPLGRCICSTGYEEIEGSCHACRPGFYKAFAGNTKCSKCPPHSLTYMEATSVCQCEKGYFRAEKDPPSMACTRPPSAPRNVVFNINETALILEWSPPSDTGGRKDLTYSVICKKCGLDTSQCEDCGGGLRFIPRHTGLINNSVIVLDFVSHVNYTFEIEAMNGVSELSFSPKPFTAITVTTDQDAPSLIGVVRKDWASQNSIALSWQAPAFSNGAILDYEIKYYEKEHEQLTYSSTRSKAPSVIITGLKPATKYVFHIRVRTATGYSGYSQKFEFETGDETSDMAAEQGQILVIATAAVGGFTLLVILTLFFLITGRCQWYIKAKMKSEEKRRNHLQNGHLRFPGIKTYIDPDTYEDPSLAVHEFAKEIDPSRIRIERVIGAGEFGEVCSGRLKTPGKREIPVAIKTLKGGHMDRQRRDFLREASIMGQFDHPNIIRLEGVVTKRSFPAIGVEAFCPSFLRAGFLNSIQAPHPVPGGGSLPPRIPAGRPVMIVVEYMENGSLDSFLRKHDGHFTVIQLVGMLRGIASGMKYLSDMGYVHRDLAARNILVNSNLVCKVSDFGLSRVLEDDPEAAYTTTGGKIPIRWTAPEAIAYRKFSSASDAWSYGIVMWEVMSYGERPYWEMSNQDVILSIEEGYRLPAPMGCPASLHQLMLHCWQKERNHRPKFTDIVSFLDKLIRNPSALHTLVEDILVMPESPGEVPEYPLFVTVGDWLDSIKMGQYKNNFVAAGFTTFDLISRMSIDDIRRIGVILIGHQRRIVSSIQTLRLHMMHIQEKGFHV

SEQ ID NO: 275 - protein, 987 aa, Homo sapiens
MALRRLGAALLLLPLLAAVEETLMDSTTATAELGWMVHPPSGWEEVSGYDENMNTIRTYQVCNVFESSQNNWLRTKFIRRRGAHRIHVEMKFSVRDCSSIPSVPGSCKETFNLYYYEADFDSATKTFPNWMENPWVKVDTIAADESFSQVDLGGRVMKINTEVRSFGPVSRSGFYLAFQDYGGCMSLIAVRVFYRKCPRIIQNGAIFQETLSGAESTSLVAARGSCIANAEEVDVPIKLYCNGDGEWLVPIGRCMCKAGFEAVENGTVCRGCPSGTFKANQGDEACTHCPINSRTTSEGATNCVCRNGYYRADLDPLDMPCTTIPSAPQAVISSVNETSLMLEWTPPRDSGGREDLVYNIICKSCGSGRGACTRCGDNVQYAPRQLGLTEPRIYISDLLAHTQYTFEIQAVNGVTDQSPFSPQFASVNITTNQAAPSAVSIMHQVSRTVDSITLSWSQPDQPNGVILDYELQYYEKELSEYNATAIKSPTNTVTVQGLKAGAIYVFQVRARTVAGYGRYSGKMYFQTMTEAEYQTSIQEKLPLIIGSSAAGLVFLIAVVVIAIVCNRRRGFERADSEYTDKLQHYTSGHMTPGMKIYIDPFTYEDPNEAVREFAKEIDISCVKIEQVIGAGEFGEVCSGHLKLPGKREIFVAIKTLKSGYTEKQRRDFLSEASIMGQFDHPNVIHLEGVVTKSTPVMIITEFMENGSLDSFLRQNDGQFTVIQLVGMLRGIAAGMKYLADMNYVHRDLAARNILVNSNLVCKVSDFGLSRFLEDDTSDPTYTSALGGKIPIRWTAPEAIQYRKFTSASDVWSYGIVMWEVMSYGERPYWDMTNQDVINAIEQDYRLPPPMDCPSALHQLMLDCWQKDRNHRPKFGQIVNTLDKMIRNPNSLKAMAPLSSGINLPLLDRTIPDYTSFNTVDEWLEAIKMGQYKESFANAGFTSFDVVSQMMMEDILRVGVTLAGHQKKILNSIQVMRAQMNQIQSVEV

SEQ ID NO: 276 - protein, 1021 aa, Homo sapiens
MATEGAAQLGNRVAGMVCSLWVLLLVSSVLALEEVLLDTTGETSEIGWLTYPPGGWDEVSVLDDQRRLTRTFEACHVAGAPPGTGQDNWLQTHFVERRGAQRAHIRLHFSVRACSSLGVSGGTCRETFTLYYRQAEEPDSPDSVSSWHLKRWTKVDTIAADESFPSSSSSSSSSSSAAWAVGPHGAGQRAGLQLNVKERSFGPLTQRGFYVAFQDTGACLALVAVRLFSYTCPAVLRSFASFPETQASGAGGASLVAAVGTCVAHAEPEEDGVGGQAGGSPPRLHCNGEGKWMVAVGGCRCQPGYQPARGDKACQACPRGLYKSSAGNAPCSPCPARSHAPNPAAPVCPCLEGFYRASSDPPEAPCTGPPSAPQELWFEVQGSALMLHWRLPRELGGRGDLLFNVVCKECEGRQEPASGGGGTCHRCRDEVHFDPRQRGLTESRVLVGGLRAHVPYILEVQAVNGVSELSPDPPQAAAINVSTSHEVPSAVPVVHQVSRASNSITVSWPQPDQTNGNILDYQLRYYDQAEDESHSFTLTSETNTATVTQLSPGHIYGFQVRARTAAGHGPYGGKVYFQTLPQGELSSQLPERLSLVIGSILGALAFLLLAAITVLAVVFQRKRRGTGYTEQLQQYSSPGLGVKYYIDPSTYEDPCQAIRELAREVDPAYIKIEEVIGTGSFGEVRQGRLQPRGRREQTVAIQALWAGGAESLQMTFLGRAAVLGQFQHPNILRLEGVVTKSRPLMVLTEFMELGPLDSFLRQREGQFSSLQLVAMQRGVAAAMQYLSSFAFVHRSLSAHSVLVNSHLVCKVARLGHSPQGPSCLLRWAAPEVIAHGKHTTSSDVWSFGILMWEVMSYGERPYWDMSEQEVLNAIEQEFRLPPPPGCPPGLHLLMLDTWQKDRARRPHFDQLVAAFDKMIRKPDTLQAGGDPGERPSQALLTPVALDFPCLDSPQAWLSAIGLECYQDNFSKFGLCTFSDVAQLSLEDLPALGITLAGHQKKLLHHIQLLQQHLRQQGSVEV

SEQ ID NO: 277 - skipped

SEQ ID NO: 278 - protein, 822 aa, Homo sapiens
MNGHISNHPSSFGMYPSQMNGYGSSPTFSQTDREHGSKTSAKALYEQRKNYARDSVSSVSDISQYRVEHLTTFVLDRKDAMITVDDGIRKLKLLDAKGKVWTQDMILQVDDRAVSLIDLESKNELENFPLNTIQHCQAVMHSCSYDSVLALVCKEPTQNKPDLHLFQCDEVKANLISEDIESAISDSKGGKQKRRPDALRMISNADPSIPPPPRAPAPAPPGTVTQVDVRSRVAAWSAWAADQGDFEKPRQYHEQEETPEMMAARIDRDVQILNHILDDIEFFITKLQKAAEAFSELSKRKKNKKGKRKGPGEGVLTLRAKPPPPDEFLDCFQKFKHGFNLLAKLKSHIQNPSAADLVHFLFTPLNMVVQATGGPELASSVLSPLLNKDTIDFLNYTVNGDERQLWMSLGGTWMKARAEWPKEQFIPPYVPRFRNGWEPPMLNFMGATMEQDLYQLAESVANVAEHQRKQEIKRLSTEHSSVSEYHPADGYAFSSNIYTRGSHLDQGEAAVAFKPTSNRHIDRNYEPLKTQPKKYAKSKYDFVARNNSELSVLKDDILEILDDRKQWWKVRNASGDSGFVPNNILDIVRPPESGLGRADPPYTHTIQKQRMEYGPRPADTPPAPSPPPTPAPVPVPLPPSTPAPVPVSKVPANITRQNSSSSDSGGSIVRDSQRHKQLPVDRRKSQMEEVQDELIHRLTIGRSAAQKKFHVPRQNVPVINITYDSTPEDVKTWLQSKGFNPVTVNSLGVLNGAQLFSLNKDELRTVCPEGARVYSQITVQKAALEDSSGSSELQEIMRRRQEKISAAASDSGVESFDEGSSH

SEQ ID NO: 279 - protein, 1308 aa, Homo sapiens
MKPATGLWVWVSLLVAAGTVQPSDSQSVCAGTENKLSSLSDLEQQYRALRKYYENCEVVMGNLEITSIEHNRDLSFLRSVREVTGYVLVALNQFRYLPLENLRIIRGTKLYEDRYALAIFLNYRKDGNFGLQELGLKNLTEILNGGVYVDQNKFLCYADTIHWQDIVRNPWPSNLTLVSTNGSSGCGRCHKSCTGRCWGPTENHCQTLTRTVCAEQCDGRCYGPYVSDCCHRECAGGCSGPKDTDCFACMNFNDSGACVTQCPQTFVYNPTTFQLEHNFNAKYTYGAFCVKKCPHNFVVDSSSCVRACPSSKMEVEENGIKMCKPCTDICPKACDGIGTGSLMSAQTVDSSNIDKFINCTKINGNLIFLVTGIHGDPYNAIEAIDPEKLNVFRTVREITGFLNIQSWPPNMTDFSVFSNLVTIGGRVLYSGLSLLILKQQGITSLQFQSLKEISAGNIYITDNSNLCYYHTINWTTLFSTINQRIVIRDNRKAENCTAEGMVCNHLCSSDGCWGPGPDQCLSCRRFSRGRICIESCNLYDGEFREFENGSICVECDPQCEKMEDGLLTCHGPGPDNCTKCSHFKDGPNCVEKCPDGLQGANSFIFKYADPDRECHPCHPNCTQGCNGPTSHDCIYYPWTGHSTLPQHARTPLIAAGVIGGLFILVIVGLTFAVYVRRKSIKKKRALRRFLETELVEPLTPSGTAPNQAQLRILKETELKRVKVLGSGAFGTVYKGIWVPEGETVKIPVAIKILNETTGPKANVEFMDEALIMASMDHPHLVRLLGVCLSPTIQLVTQLMPHGCLLEYVHEHKDNIGSQLLLNWCVQIAKGMMYLEERRLVHRDLAARNVLVKSPNHVKITDFGLARLLEGDEKEYNADGGKMPIKWMALECIHYRKFTHQSDVWSYGVTIWELMTFGGKPYDGIPTREIPDLLEKGERLPQPPICTIDVYMVMVKCWMIDADSRPKFKELAAEFSRMARDPQRYLVIQGDDRMKLPSPNDSKFFQNLLDEEDLEDMMDAEEYLVPQAFNIPPPIYTSRARIDSNRSEIGHSPPPAYTPMSGNQFVYRDGGFAAEQGVSVPYRAPTSTIPEAPVAQGATAEIFDDSCCNGTLRKPVAPHVQEDSSTQRYSADPTVFAPERSPRGELDEEGYMTPMRDKPKQEYLNPVEENPFVSRRKNGDLQALDNPEYHNASNGPPKAEDEYVNEPLYLNTFANTLGKAEYLKNNILSMPEKAKKAFDNPDYWNHSLPPRSTLQHPDYLQEYSTKYFYKQNGRIRPIVAENPEYLSEFSLKPGTVLPPPPYRHRNTVV

SEQ ID NO: 280 - protein, 1419 aa, Homo sapiens
MTTKRSLFVRLVPCRCLRGEEETVTTLDYSHCSLEQVPKEIFTFEKTLEELYLDANQIEELPKQLFNCQSLHKLSLPDNDLTTLPASIANLINLRELDVSKNGIQEFPENIKNCKVLTIVEASVNPISKLPDGFSQLLNLTQLYLNDAFLEFLPANFGRLTKLQILELRENQLKMLPKTMNRLTQLERLDLGSNEFTEVPEVLEQLSGLKEFWMDANRLTFIPGFIGSLKQLTYLDVSKNNIEMVEEGISTCENLQDLLLSSNSLQQLPETIGSLKNITTLKIDENQLMYLPDSIGGLISVEELDCSFNEVEALPSSIGQLTNLRTFAADHNYLQQLPPEIGSWKNITVLFLHSNKLETLPEEMGDMQKLKVINLSDNRLKNLPFSFTKLQQLTAMWLSDNQSKPLIPLQKETDSETQKMVLTNYMFPQQPRTEDVMFISDNESFNPSLWEEQRKQRAQVAFECDEDKDEREAPPREGNLKRYPTPYPDELKNMVKTVQTIVHRLKDEETNEDSGRDLKPHEDQQDINKDVGVKTSESTTTVKSKVDEREKYMIGNSVQKISEPEAEISPGSLPVTANMKASENLKHIVNHDDVFEESEELSSDEEMKMAEMRPPLIETSINQPKVVALSNNKKDDTKETDSLSDEVTHNSNQNNSNCSSPSRMSDSVSLNTDSSQDTSLCSPVKQTHIDINSKIRQEDENFNSLLQNGDILNSSTEEKFKAHDKKDFNLPEYDLNVEERLVLIEKSVDSTATADDTHKLDHINMNLNKLITNDTFQPEIMERSKTQDIVLGTSFLSINSKEETEHLENGNKYPNLESVNKVNGHSEETSQSPNRTEPHDSDCSVDLGISKSTEDLSPQKSGPVGSVVKSHSITNMEIGGLKIYDILSDNGPQQPSTTVKITSAVDGKNIVRSKSATLLYDQPLQVFTGSSSSSDLISGTKAIFKFDSNHNPEEPNIIRGPTSGPQSAPQIYGPPQYNIQYSSSAAVKDTLWHSKQNPQIDHASFPPQLLPRSESTENQSYAKHSANMNFSNHNNVRANTAYHLHQRLGPARHGEMWAISPNDRLIPAVTRSTIQRQSSVSSTASVNLGDPGSTRRAQIPEGDYLSYREFHSAGRTPPMMPGSQRPLSARTYSIDGPNASRPQSARPSINEIPERTMSVSDFNYSRTSPSKRPNARVGSEHSLLDPPGKSKVPRDWREQVLRHIEAKKLEKSMLSRSFNSNFTTVSSFHCGSSRDLHGSQGSLALSVADRRGSGGHIFRMPLSNGQMGQPLRPQANYSQIHHPPQASVARHPSREQLIDYLMLKVAHQPPYTQPHCSPRQGHELAKQEIRVRVEKDPELGFSISGGVGGRGNPFRPDDDGIFVTRVQPEGPASKLLQPGDKIIQANGYSFINIEHGQAVSLLKTFQNTVELIIVREVSS

SEQ ID NO: 281 - protein, 486 aa, Homo sapiens
MIQTVPDPAAHIKEALSVVSEDQSLFECAYGTPHLAKTEMTASSSSDYGQTSKMSPRVPQQDWLSQPPARVTIKMECNPSQVNGSRNSPDECSVAKGGKMVGSPDTVGMNYGSYMEEKHMPPPNMTTNERRVIVPADPTLWSTDHVRQWLEWAVKEYGLPDVNILLFQNIDGKELCKMTKDDFQRLTPSYNADILLSHLHYLRETPLPHLTSDDVDKALQNSPRLMHARNTGGAAFIFPNTSVYPEATQRITTRPDLPYEPPRRSAWTGHGHPTPQSKAAQPSPSTVPKTEDQRPQLDPYQILGPTSSRLANPGSGQIQLWQFLLELLSDSSNSSCITWEGTNGEFKMTDPDEVARRWGERKSKPNMNYDKLSRALRYYYDKNIMTKVHGKRYAYKFDFHGIAQALQPHPPESSLYKYPSDLPYMGSYHAHPQKMNFVAPHPPALPVTSSSFFAAPNPYWNSPTGGIYPNTRLPTSHMPSHLGTYY

SEQ ID NO: 282 - protein, 297 aa, Homo sapiens
MKTLSPDRIQPHIMTDVPATFTQAECNGDKPPENGQQTITKISEELTDVDSPLPHYRVEPSLEGALTKGSQEERRKLQGNMLLNSSMEDKMLKENPEEKLFIVHKAITDLSLQETSADEMTFREGHQWEKIPLSGSNQEIRRQKERITEQPLKEEEDEDRKNKGHQAAEIEWLGFRKPSQADMLHSKHDEEQKVWDEEIDDDDDDNCNNDEDEVRVIEFKKKHEEVSQFKEEGDASEDSPLSSASSQAVTPDEQPTLGKKSDISRNAYSRYNTISYRKIRKGNTKQRIDEFESMMHL

SEQ ID NO: 283 - protein, 595 aa, Homo sapiens [sequence omitted]

SEQ ID NO: 284 - protein, 530 aa, Homo sapiens
MDIKNSPSSLNSPSSYNCSQSILPLEHGSIYIPSSYVDSHHEYPAMTFYSPAVMNYSIPSNVTNLEGGPGRQTTSPNVLWPTPGHLSPLVVHRQLSHLYAEPQKSPWCEARSLEHTLPVNRETLKRKVSGNRCASPVTGPGSKRDAHFCAVCSDYASGYHYGVWSCEGCKAFFKRSIQGHNDYICPATNQCTIDKNRRKSCQACRLRKCYEVGMVKCGSRRERCGYRLVRRQRSADEQLHCAGKAKRSGGHAPRVRELLLDALSPEQLVLTLLEAEPPHVLISRPSAPFTEASMMMSLTKLADKELVHMISWAKKIPGFVELSLFDQVRLLESCWMEVLMMGLMWRSIDHPGKLIFAPDLVLDRDEGKCVEGILEIFDMLLATTSRFRELKLQHKEYLCVKAMILLNSSMYPLVTATQDADSSRKLAHLLNAVTDALVWVIAKSGISSQQQSMRLANLLMLLSHVRHASNKGMEHLLNMKCKNVVPVYDLLLEMLNAHVLRGCKSSITGSECSPAEDSKSKEGSQNPQSQ

SEQ ID NO: 285 - protein, 508 aa, Homo sapiens
MSSDDRHLGSSCGSFIKTEPSSPSSGIDALSHHSPSGSSDASGGFGLALGTHANGLDSPPMFAGAGLGGTPCRKSYEDCASGIMEDSAIKCEYMLNAIPKRLCLVCGDIASGYHYGVASCEACKAFFKRTIQGNIEYSCPATNECEITKRRRKSCQACRFMKCLKVGMLKEGVRLDRVRGGRQKYKRRLDSESSPYLSLQISPPAKKPLTKIVSYLLVAEPDKLYAMPPPGMPEGDIKALTTLCDLADRELVVIIGWAKHIPGFSSLSLGDQMSLLQSAWMEILILGIVYRSLPYDDKLVYAEDYIMDEEHSRLAGLLELYRAILQLVRRYKKLKVEKEEFVTLKALALANSDSMYIEDLEAVQKLQDLLHEALQDYELSQRHEEPWRTGKLLLTLPLLRQTAAKAVQHFYSVKLQGKVPMHKLFLEMLEAKVGQEQLRGSPKDERMSSHDGKCPFQSAAFTSRDQSNSPGIPNPRPSSPTPLNERGRQISPSTRTPGGQGKHLWLTM

SEQ ID NO: 286 - protein, 346 aa, Homo sapiens
MYLSLWVTINTVNLRNTLSGLRGAVTTVGMIKSDVPGTQEWLDERRRQGDLPLPTNSNPVLSLELCDPGQGPAPFQAVVVLIQPGRGLALRPPPSCLFPPDPTPSPPAGQIRVKPDRTGVVTDGVKHSMNPFCEIAVEEAVRLKEKKLVKEVIAVSCGPAQCQETIRTALAMGADRGIHVEVPPAEAERLGPLQVARVLAKLAEKEKVDLVLLGKQAIDDDCNQTGQMTAGFLDWPQGTFASQVTLEGDKLKVEREIDGGLETLRLKLPAVVTADLRLNEPRYATLPNIMKAKKKKIEVIKPGDLGVDLTSKLSVISVEDPPQRTAGVKVETTEDLVAKLKEIGRI

SEQ ID NO: 287 - protein, 745 aa, Homo sapiens
MKETDREAVATAVQRVAGMLQRPDQLDKVEQYRRREARKKASVEARLKAAIQSQLDGVRTGLSQLHNALNDVKDIQQSLADVSKDWRQSINTIESLKDVKDAVVQHSQLAAAVENLKNIFSVPEIVRETQDLIEQGALLQAHRKLMDLECSRDGLMYEQYRMDSGNTRDMTLIHGYFGSTQGLSDELAKQLWMVLQRSLVTVRRDPTLLVSVVRIIEREEKIDRRILDRKKQTGFVPPGRPKNWKEKMFTILERTVTTRIEGTQADTRESDKMWLVRHLEIIRKYVLDDLIVAKNLMVQCFPPHYEIFKNLLNMYHQALSTRMQDLASEDLEANEIVSLLTWVLNTYTSTEMMRNVELAPEVDVGTLEPLLSPHVVSELLDTYMSTLTSNIIAWLRKALETDKKDWVKETEPEADQDGYYQTTLPAIVFQMFEQNLQVAAQISEDLKTKVLVLCLQQMNSFLSRYKDEAQLYKEEHLRNRQHPHCYVQYMIAIINNCQTFKESIVSLKRKYLKNEVEEGVSPSQPSMDGILDAIAKEGCSGLLEEVFLDLEQHLNELMTKKWLLGSNAVDIICVTVEDYFNDFAKIKKPYKKRMTAEAHRRVVVEYLRAVMQKRISFRSPEERKEGAEKMVREAEQLRFLFRKLASGFGEDVDGYCDTIVAVAEVIKLTDPSLLYLEVSTLVSKYPDIRDDHIGALLAVRGDASRDMKQTIMETLEQGPAQASPSYVPLFKDIVVPSLNVAKLLK

SEQ ID NO: 288 - protein, 708 aa, Homo sapiens
MATTAELFEEPFVADEYIERLVWRTPGGGSRGGPEAFDPKRLLEEFVNHIQELQIMDERIQRKVEKLEQQCQKEAKEFAKKVQELQKSNQVAFQHFQELDEHISYVATKVCHLGDQLEGVNTPRQRAVEAQKLMKYFNEFLDGELKSDVFTNSEKIKEAADIIQKLHLIAQELPFDRFSEVKSKIASKYHDLECQLIQEFTSAQRRGEISRMREVAAVLLHFKGYSHCVDVYIKQCQEGAYLRNDIFEDAGILCQRVNKQVGDIFSNPETVLAKLIQNVFEIKLQSFVKEQLEECRKSDAEQYLKNLYDLYTRTTNLSSKLMEFNLGTDKQTFLSKLIKSIFISYLENYIEVETGYLKSRSAMILQRYYDSKNHQKRSIGTGGIQDLKERIRQRTNLPLGPSIDTHGETFLSQEVVVNLLQETKQAFERCHRLSDPSDLPRNAFRIFTILVEFLCIEHIDYALETGLAGIPSSDSRNANLYFLDVVQQANTIFHLFDKQFNDHLMPLISSSPKLSECLQKKKEIIEQMEMKLDTGIDRTLNCMIGQMKHILAAEQKKTDFKPEDENNVLIQYTNACVKVCAYVRKQVEKIKNSMDGKNVDTVLMELGVRFHRLIYEHLQQYSYSCMGGMLAICDVAEYRKCAKDFKIPMVLHLFDTLHALCNLLVVAPDNLKQVCSGEQLANLDKNILHSFVQLRADYRSARLARHFS

SEQ ID NO: 289 - protein, 804 aa, Homo sapiens
MAENSESLGTVPEHERILQEIESTDTACVGPTLRSVYDDQPNAHKKFMEKLDACIRNHDKEIEKMCNFHHQGFVDAITELLKVRTDAEKLKVQVTDTNRRFQDAGKEVIVHTEDIIRCRIQQRNITTVVEKLQLCLPVLEMYSKLKEQMSAKRYYSALKTMEQLENVYFPWVSQYRFCQLMIENLPKLREDIKEISMSDLKDFLESIRKHSDKIGETAMKQAQHQKTFSVSLQKQNKMKFGKNMYINRDRIPEERNETVLKHSLEEEDENEEEILTVQDLVDFSPVYRCLHIYSVLGDEETFENYYRKQRKKQARLVLQPQSNMHETVDGYRRYFTQIVGFFVVEDHILHVTQGLVTRAYTDELWNMALSKIIAVLRAHSSYCTDPDLVLELKNLTVIFADTLQGYGFPVNRLFDLLFEIRDQYNETLLKKWAGVFRDIFEEDNYSPIPVVNEEEYKIVISKFPFQDPDLEKQSFPKKFPMSQSVPHIYIQVKEFIYASLKFSESLHRSSTEIDDMLRKSTNLLLTRTLSSCLLNLIRKPHIGLTELVQIIINTTHLEQACKYLEDFITNITNISQETVHTTRLYGLSTFKDARHAAEGEIYTKLNQKIDEFVQLADYDWTMSEPDGRASGYLMDLINFLRSIFQVFTHLPGKVAQTACMSACQHLSTSLMQMLLDSELKQISMGAVQQFNLDVIQCELFASSEPVPGFQGDTLQLAFIDLRQLLDLFMVWDWSTYLADYGQPASKYLRVNPNTALTLLEKMKDTSKKNNIFAQFRKNDRDKQKLIETVVKQLRSLVNGMSQHM

SEQ ID NO: 290 - protein, 811 aa, Homo sapiens
MERGKMAEAESLETAAEHERILREIESTDTACIGPTLRSVYDGEEHGRFMEKLETRIRNHDREIEKMCNFHYQGFVDSITELLKVRGEAQKLKNQVTDTNRKLQHEGKELVIAMEELKQCRLQQRNISATVDKLMLCLPVLEMYSKLRDQMKTKRHYPALKTLEHLEHTYLPQVSHYRFCKVMVDNIPKLREEIKDVSMSDLKDFLESIRKHSDKIGETAMKQAQQQRNLDNIVLQQPRIGSKRKSKKDAYIIFDTEIESTSPKSEQDSGILDVEDEEDDEEVPGAQDLVDFSPVYRCLHIYSVLGARETFENYYRKQRRKQARLVLQPPSNMHETLDGYRKYFNQIVGFFVVEDHILHTTQGLVNRAYIDELWEMALSKTIAALRTHSSYCSDPNLVLDLKNLIVLFADTLQVYGFPVNQLFDMLLEIRDQYSETLLKKWAGIFRNILDSDNYSPIPVTSEEMYKKVVGQFPFQDIELEKQPFPKKFPFSEFVPKVYNQIKEFIYACLKFSEDLHLSSTEVDDMIRKSTNLLLTRTLSNSLQNVIKRKNIGLTELVQIIINTTHLEKSCKYLEEFITNITNVLPETVHTTKLYGTTTFKDARHAAEEEIYTNLNQKIDQFLQLADYDWMTGDLGNKASDYLVDLIAFLRSTFAVFTHLPGKVAQTACMSACKHLATSLMQLLLEAEVRQLTLGALQQFNLDVRECEQFARSGPVPGFQEDTLQLAFIDLRQLLDLFIQWDWSTYLADYGQPNCKYLRVNPVTALTLLEKMKDTSRKNNMFAQFRKNERDKQKLIDTVAKQLRGLISSHHS

SEQ ID NO: 291 - protein, 746 aa, Homo sapiens
MQAKKRYFILLSAGSCLALLFYFGGLQFRASRSHSRREEHSGRNGLHHPSPDHFWPRFPDALRPFVPWDQLENEDSSVHISPRQKRDANSSIYKGKKCRMESCFDFTLCKKNGFKVYVYPQQKGEKIAESYQNILAAIEGSRFYTSDPSQACLFVLSLDTLDRDQLSPQYVHNLRSKVQSLHLWNNGRNHLIFNLYSGTWPDYTEDVGFDIGQAMLAKASISTENFRPNFDVSIPLFSKDHPRTGGERGFLKFNTIPPLRKYMLVFKGKRYLTGIGSDTRNALYHVHNGEDVVLLTTCKHGKDWQKHKDSRCDRDNTEYEKYDYREMLHNATFCLVPRGRRLGSFRFLEALQAACVPVMLSNGWELPFSEVINWNQAAVIGDERLLLQIPSTIRSIHQDKILALRQQTQFLWEAYFSSVEKIVLTTLEIIQDRIFKHISRNSLIWNKHPGGLFVLPQYSSYLGDFPYYYANLGLKPPSKFTAVIHAVTPLVSQSQPVLKLLVAAAKSQYCAQIIVLWNCDKPLPAKHRWPATAVPVVVIEGESKVMSSRFLPYDNIITDAVLSLDEDTVLSTTEVDFAFTVWQSFPERIVGYPARSHFWDNSKERWGYTSKWTNDYSMVLTGAAIYHKYYHYLYSHYLPASLKNMVDQLANCEDILMNFLVSAVTKLPPIKVTQKKQYKETMMGQTSRASRWADPDHFAQRQSCMNTFASWFGYMPLIHSQMRLDPVLFKDQVSILRKKYRDIERL

SEQ ID NO: 292 - protein, 732 aa, Homo sapiens
MSETSRTAFGGRRAVPPNNSNAAEDDLPTVELQGVVPRGVNLQEFLNVTSVHLFKERWDTNKVDHHTDKYENNKLIVRRGQSFYVQIDFSRPYDPRRDLFRVEYVIGRYPQENKGTYIPVPIVSELQSGKWGAKIVMREDRSVRLSIQSSPKCIVGKFRMYVAVWTPYGVLRTSRNPETDTYILFNPWCEDDAVYLDNEKEREEYVLNDIGVIFYGEVNDIKTRSWSYGQFEDGILDTCLYVMDRAQMDLSGRGNPIKVSRVGSAMVNAKDDEGVLVGSWDNIYAYGVPPSAWTGSVDILLEYRSSENPVRYGQCWVFAGVFNTFLRCLGIPARIVTNYFSAHDNDANLQMDIFLEEDGNVNSKLTKDSVWNYHCWNEAWMTRPDLPVGFGGWQAVDSTPQENSDGMYRCGPASVQAIKHGHVCFQFDAPFVFAEVNSDLIYITAKKDGTHVVENVDATHIGKLIVTKQIGGDGMMDITDTYKFQEGQEEERLALETALMYGAKKPLNTEGVMKSRSNVDMDFEVENAVLGKDFKLSITFRNNSHNRYTITAYLSANITFYTGVPKAEFKKETFDVTLEPLSFKKEAVLIQAGEYMGQLLEQASLHFFVTARINETRDVLAKQKSTVLTIPEIIIKVRGTQVVGSDMTVTVEFTNPLKETLRNVWVHLDGPGVTRPMKKMFREIRPNSTVQWEEVCRPWVSGHRKLIASMSSDSLRHVYGELDVQIQRRPSM

SEQ ID NO: 293 - protein, 133 aa, Homo sapiens [sequence omitted]

SEQ ID NO: 294 - protein, 135 aa, Homo sapiens
MATVQQLEGRWRLVDSKGFDEYMKELGVGIALRKMGAMAKPDCIITCDGKNLTIKTESTLKTTQFSCTLGEKFEETTADGRKTQTVCNFTDGALVQHQEWDGKESTITRKLKDGKLVVECVMNNVTCTRIYEKVE

SEQ ID NO: 295 - protein, 132 aa, Homo sapiens
MVEAFCATWKLTNSQNFDEYMKALGVGFATRQVGNVTKPTVIISQEGDKVVIRTLSTFKNTEISFQLGEEFDETTADDRNCKSVVSLDGDKLVHIQKWDGKETNFVREIKDGKMVMTLTFGDVVAVRHYEKA

SEQ ID NO: 296 - protein, 1406 aa, Homo sapiens
MSEIQGTVEFSVELHKFYNVDLFQRGYYQIRVTLKVSSRIPHRLSASIAGQTESSSLHSACVHDSTVHSRVFQILYRNEEVPINDAVVFRVHLLLGGERMEDALSEVDFQLKVDLHFTDSEQQLRDVAGAPMVSSRTLGLHFHPRNGLHHQVPVMFDYFHLSVISVTVHAALVALQQPLISFTRPGRGSWLGKGGPDTGQEQSIISLENLVFGAGYCKPTSSEGSFYITSENCMQHAHKWHRDLCLLLLHAYRGLRLHFLVIMRDIPELPHTELEALAVEETLSQLCSELQMLNNPEKIAEQISKDLAWLTSHMMTLWTQFLDTVTLHSQVTTYLTQEHHTLRVRRFSEAFFYMEHQKLAVLTFQENLIQTHSQLSLDIRNSEYLTSMPPLPAECLDIDGDWNTLPVIFEDRYVDCPATGHNLSVYPNFDVPVTSPTIMNLKDKEDNCMVNSNLSFREDLVLSTIKPSQMDSDEEVIRCPEPGENVATQNHMDMCSESQVYISIGEFQNKAGVPEDECWTGQTSDAGTYPVADVDTSRRSPGPEDGQAPVLTYIDVKSSNKNPSRAEPLVAFNAQHESRSSRDKYGLDRTGLSKVVVGGSHQNAISSDKTTLHELSTLGKGIDQEGKMVLLSLKLTPSEPCDPLSSTLREPLDIRSSLKDSHTEEQEELSVLSGVIKRSSSIISDSGIESEPSSVAWSEARSRALELPSDREVLHPFVRRHALHRNSLEGGHTESNTSLPSGIQASLTSISSLPFEEDEREVALTKLTKSVSAPHISSPEEAAEDADTKQQDGGFAEPSDMHSKSQGSPGSCSQLCGDSGTDAGADHPLVEIVLDADNQQGPGYIDIPKGKGKQFDAQGHCLPDGRTENTPGVETKGLNLKIPRVIALENPRTRSLHRALEETPKGMPKDLNVGQQALSNSGISEVEGLSQHQVPELSCTSAADAINRNSTGQQSQSGSPCIMDDTAFNRGVNAFPEAKHKAGTVCPTVTHSVHSQVLKNQELKAGTSIMGSHLTSAETFTLDSLKAVEVVNLSVSCTATCLPFSSVPKETPARAGFSSKQTLFPITHQPLGSFGVVSTHSSTLDEEVSERMFSFYQAKEKFKKELKIEGFLYSDLTVLASDIPYFPPEEEEENLEDGIHLVVCVHGLDGNSADLRLVKTFIELGLPGGKLDFLMSEKNQMDTFADFDTMTDRLLDEIIQHIQLYNLSISRISFIGHSLGNIIIRSVLTRPRFRYYLNKLHTFLSLSGPHLGTLYNNSTLVSTGLWLMQKLKKSGSLLQLTFRDNADLRKCFLYQLSQKTGLQYFKNVVLVASPQDRYVPFHSARIEMCKTALKDRHTGPVYAEMINNLLGPLVEAKDCTLIRHNVFHALPNTANTLIGRAAHIAVLDSELFLEKFFLVAGLNYFK

SEQ ID NO: 297 - protein, 304 aa, Homo sapiens
MNIVFSRDSQVRVMENTVANTEKYFGQFCSLLAAYTRKTARLRDKADQLVKQLIDFANSENPELRATMRGFAEDLAKVQDYRQAQVERLETKVVNPLKLYGAQIKQTRAEIKKFKHVQNHEIKQLEKLEKLRQKSPSDQQMISQAETRVQRAAVDSSRTTLQLEETVDGFQRQKLKDLQKFFCDFVTIEMVFHAKAVEVYSSAFQTLEKYDLERDLLDFRAKMQGVYGHYDTRLLANTSPPPSVLQSLASQGTLQVQLSRANEDPEHPHANHGRFSLCEWVVKGQPAHCVCGQGGHLMLPGHSL

SEQ ID NO: 298 - protein, 1017 aa, Homo sapiens
MMSEGKPPDKKRPRRSLSISKNKKKASNSIISCFNNAPPAKLACPVCSKMVPRYDLNRHLDEMCANNDFVQVDPGQVGLINSNVSMVDLTSVTLEDVTPKKSPPPKTNLTPGQSDSAKREVKQKISPYFKSNDVVCKNQDELRNRSVKVICLGSLASKLSRKYVKAKKSIDKDEEFAGSSPQSSKSTVVKSLIDNSSEIEDEDQILENSSQKENVFKCDSLKEECIPEHMVRGSKIMEAESQKATRECEKSALTPGFSDNAIMLFSPDFTLRNTLKSTSEDSLVKQECIKEVVEKREACHCEEVKMTVASEAKIQLSDSEAKSHSSADDASAWSNIQEAPLQDDSCLNNDIPHSIPLEQGSSCNGPGQTTGHPYYLRSFLVVLKTVLENEDDMLLFDEQEKGIVTKFYQLSATGQKLYVRLFQRKLSWIKMTKLEYEEIALDLTPVIEELTNAGFLQTESELQELSEVLELLSAPELKSLAKTFHLVNPNGQKQQLVDAFLKLAKQRSVCTWGKNKPGIGAVILKRAKALAGQSVRICKGPRAVFSRILLLFSLTDSMEDEDAACGGQGQLSTVLLVNLGRMEFPSYTINRKTHIFQDRDDLIRYAAATHMLSDISSAMANGNWEEAKELAQCAKRDWNRLKNHPSLRCHEDLPLFLRCFTVGWIYTRILSRFVEILQRLHMYEEAVRELESLLSQRIYCPDSRGRWWDRLALNLHQHLKRLEPTIKCITEGLADPEVRTGHRLSLYQRAVRLRESPSCKKFKHLFQQLPEMAVQDVKHVTITGRLCPQRGMCKSVFVMEAGEAADPTTVLCSVEELALAHYRRSGFDQGIHGEGSTFSTLYGLLLWDIIFMDGIPDVFRNACQAFPLDLCTDSFFTSRRPALEARLQLIHDAPEESLRAWVAATWHEQEGRVASLVSWDRFTSLQQAQDLVSCLGGPVLSGVCRHLAADFRHCRGGLPDLVVWNSQSRHFKLVEVKGPNDRLSHKQMIWLAELQKLGAEVEVCHVVAVGAKSQSLS

SEQ ID NO: 299 - skipped

SEQ ID NO: 300 - protein, 4588 aa, Homo sapiens
MGRHLALLLLLLLLFQHFGDSDGSQRLEQTPLQFTHLEYNVTVQENSAAKTYVGHPVKMGVYITHPAWEVRYKIVSGDSENLFKAEEYILGDFCFLRIRTKGGNTAILNREVKDHYTLIVKALEKNTNVEARTKVRVQVLDTNDLRPLFSPTSYSVSLPENTAIRTSIARVSATDADIGTNGEFYYSFKDRTDMFAIHPTSGVIVLTGRLDYLETKLYEMEILAADRGMKLYGSSGISSMAKLTVHIEQANECAPVITAVTLSPSELDRDPAYAIVTVDDCDQGANGDIASLSIVAGDLLQQFRTVRSFPGSKEYKVKAIGGIDWDSHPFGYNLTLQAKDKGTPPQFSSVKVIHVTSPQFKAGPVKFEKDVYRAEISEFAPPNTPVVMVKAIPAYSHLRYVFKSTPGKAKFSLNYNTGLISILEPVKRQQAAHFELEVTTSDRKASTKVLVKVLGANSNPPEFTQTAYKAAFDENVPIGTTVMSLSAVDPDEGENGYVTYSIANLNHVPFAIDHFTGAVSTSENLDYELMPRVYTLRIRASDWGLPYRREVEVLATITLNNLNDNTPLFEKINCEGTIPRDLGVGEQITTVSAIDADELQLVQYQIEAGNELDFFSLNPNSGVLSLKRSLMDGLGAKVSFHSLRITATDGENFATPLYINITVAASHKLVNLQCEETGVAKMLAEKLLQANKLHNQGEVEDIFFDSHSVNAHIPQFRSTLPTGIQVKENQPVGSSVIFMNSTDLDTGFNGKLVYAVSGGNEDSCFMIDMETGMLKILSPLDRETTDKYTLNITVYDLGIPQKAAWRLLHVVVVDANDNPPEFLQESYFVEVSEDKEVHSEIIQVEATDKDLGPNGHVTYSIVTDTDTFSIDSVTGVVNIARPLDRELQHEHSLKIEARDQAREEPQLFSTVVVKVSLEDVNDNPPTFIPPNYRVKVREDLPEGTVIMWLEAHDPDLGQSGQVRYSLLDHGEGNFDVDKLSGAVRIVQQLDFEKKQVYNLTVRAKDKGKPVSLSSTCYVEVEVVDVNENLHPPVFSSFVEKGTVKEDAPVGSLVMTVSAHDEDARRDGEIRYSIRDGSGVGVFKIGEETGVIETSDRLDRESTSHYWLTVFATDQGVVPLSSFIEIYIEVEDVNDNAPQTSEPVYYPEIMENSPKDVSVVQIEAFDPDSSSNDKLMYKITSGNPQGFFSIHPKTGLITTTSRKLDREQQDEHILEVTVTDNGSPPKSTIARVIVKILDENDNKPQFLQKFYKIRLPEREKPDRERNARREPLYHVIATDKDEGPNAEISYSIEDGNEHGKFFIEPKTGVVSSKRFSAAGEYDILSIKAVDNGRPQKSSTTRLHIEWISKPKPSLEPISFEESFFTFTVMESDPVAHMIGVISVEPPGIPLWFDITGGNYDSHFDVDKGTGTIIVAKPLDAEQKSNYNLTVEATDGTTTILTQVFIKVIDTNDHRPQFSTSKYEVVIPEDTAPETEILQISAVDQDEKNKLIYTLQSSRDPLSLKKFRLDPATGSLYTSEKLDHEAVHQHTLTVMVRDQDVPVKRNFARIVVNVSDTNDHAPWFTASSYKGRVYESAAVGSVVLQVTALDKDKGKNAEVLYSIESGNIGNSFMIDPVLGSIKTAKELDRSNQAEYDLMVKATDKGSPPMSEITSVRIFVTIADNASPKFTSKEYSVELSETVSIGSFVGMVTAHSQSSVVYEIKDGNTGDAFDINPHSGTIITQKALDFETLPIYTLIIQGTNMAGLSTNTTVLVHLQDENDNAPVFMQAEYTGLISESASINSVVLTDRNVPLVIRAADADKDSNALLVYHIVEPSVHTYFAIDSSTGAIHTVLSLDYEETSIFHFTVQVHDMGTPRLFAEYAANVTVHVIDINDCPPVFAKPLYEASLLLPTYKGVKVITVNATDADSSAFSQLIYSITEGNIGEKFSMDYKTGALTVQNTTQLRSRYELTVRASDGRFAGLTSVKINVKESKESHLKFTQDVYSAVVKENSTEAETLAVITAIGNPINEPLFYHILNPDRRFKISRTSGVLSTTGTPFDREQQEAFDVVVEVTEEHKPSAVAHVVVKVIVEDQNDNAPVFVNLPYYAVVKVDTEVGHVIRYVTAVDRDSGRNGEVHYYLKEHHEHFQIGPLGEISLKKQFELDTLNKEYLVTVVAKDGGNPAFSAEVIVPITVMNKAMPVFEKPFYSAEIAESIQVHSPVVHVQANSPEGLKVFYSITDGDPFSQFTINFNTGVINVIAPLDFEAHPAYKLSIRATDSLTGAHAEVFVDIIVDDINDNPPVFAQQSYAVTLSEASVIGTSVVQVRATDSDSEPNRGISYQMFGNHSKSHDHFHVDSSTGLISLLRTLDYEQSRQHTIFVRAVDGGMPTLSSDVIVTVDVTDLNDNPPLFEQQIYEARISEHAPHGHFVTCVKAYDADSSDIDKLQYSILSGNDHKHFVIDSATGIITLSNLHRHALKPFYSLNLSVSDGVFRSSTQVHVTVIGGNLHSPAFLQNEYEVELAENAPLHTLVMEVKTTDGDSGIYGHVTYHIVNDFAKDRFYINERGQIFTLEKLDRETPAEKVISVRLMAKDAGGKVAFCTVNVILTDDNDNAPQFRATKYEVNIGSSAAKGTSVVKVLASDADEGSNADITYAIEADSESVKENLEINKLSGVITTKESLIGLENEFFTFFVRAVDNGSPSKESVVLVYVKILPPEMQLPKFSEPFYTFTVSEDVPIGTEIDLIRAEHSGTVLYSLVKGNTPESNRDESFVIDRQSGRLKLEKSLDHETTKWYQFSILARCTQDDHEMVASVDVSIQVKDANDNSPVFESSPYEAFIVENLPGGSRVIQIRASDADSGTNGQVMYSLDQSQSVEVIESFAINMETGWITTLKELDHEKRDNYQIKVVASDHGEKIQLSSTAIVDVTVTDVNDSPPRFTAEIYKGTVSEDDPQGGVIAILSTTDADSEEINRQVTYFITGGDPLGQFAVETIQNEWKVYVKKPLDREKRDNYLLTITATDGTFSSKAIVEVKVLDANDNSPVCEKTLYSDTIPEDVLPGKLIMQISATDADIRSNAEITYTLLGSGAEKFKLNPDTGELKTSTPLDREEQAVYHLLVRATDGGGRFCQASIVLTLEDVNDNAPEFSADPYAITVFENTEPGTLLTRVQATDADAGLNRKILYSLIDSADGQFSINELSGIIQLEKPLDRELQAVYTLSLKAVDQGLPRRLTATGTVIVSVLDINDNPPVFEYREYGATVSEDILVGTEVLQVYAASRDIEANAEITYSIISGNEHGKFSIDSKTGAVFIIENLDYESSHEYYLTVEATDGGTPSLSDVATVNVNVTDINDNTPVFSQDTYTTVISEDAVLEQSVITVMADDADGPSNSHIHYSIIDGNQGSSFTIDPVRGEVKVTKLLDRETISGYTLTVQASDNGSPPRVNTTTVNIDVSDVNDNAPVFSRGNYSVIIQENKPVGFSVLQLVVTDEDSSHNGPPFFFTIVTGNDEKAFEVNPQGVLLTSSAIKRKEKDHYLLQVKVADNGKPQLSSLTYIDIRVIEESIYPPAILPLEIFITSSGEEYSGGVIGKIHATDQDVYDTLTYSLDPQMDNLFSVSSTGGKLIAHKKLDIGQYLLNVSVTDGKFTTVADITVHIRQVTQEMLNHTIAIRFANLTPEEFVGDYWRNFQRALRNILGVRRNDIQIVSLQSSEPHPHLDVLLFVEKPGSAQISTKQLLHKINSSVTDIEEIIGVRILNVFQKLCAGLDCPWKFCDEKVSVDESVMSTHSTARLSFVTPRHHRAAVCLCKEGRCPPVHHGCEDDPCPEGSECVSDPWEEKHTCVCPSGRFGQCPGSSSMTLTGNSYVKYRLTENENKLEMKLTMRLRTYSTHAVVMYARGTDYSILEIHHGRLQYKFDCGSGPGIVSVQSIQVNDGQWHAVALEVNGNYARLVLDQVHTASGTAPGTLKTLNLDNYVFFGGHIRQQGTRHGRSPQVGNGFRGCMDSIYLNGQELPLNSKPRSYAHIEESVDVSPGCFLTATEDCASNPCQNGGVCNPSPAGGYYCKCSALYIGTHCEISVNPCSSKPCLYGGTCVVDNGGFVCQCRGLYTGQRCQLSPYCKDEPCKNGGTCFDSLDGAVCQCDSGFRGERCQSDIDECSGNPCLHGALCENTHGSYHCNCSHEYRGRHCEDAAPNQYVSTPWNIGLAEGIGIVVFVAGIFLLVVVFVLCRKMISRKKKHQAEPKDKHLGPATAFLQRPYFDSKLNKNIYSDIPPQVPVRPISYTPSIPSDSRNNLDRNSFEGSAIPEHPEFSTFNPESVHGHRKAVAVCSVAPNLPPPPPSNSPSDSDSIQKPSWDFDYDTKVVDLDPCLSKKPLEEKPSQPYSARESLSEVQSLSSFQSESCDDNGYHWDTSDWMPSVPLPDIQEFPNYEVIDEQTPLYSADPNAIDTDYYPGGYDIESDFPPPPEDFPAADELPPLPPEFSNQFESIHPPRDMPAAGSLGSSSRNRQRFNLNQYLPNFYPLDMSEPQTKGTGENSTCREPHAPYPPGYQRHFEAPAVESMPMSVYASTASCSDVSACCEVESEVMMSDYESGDDGHFEEVTIPPLDSQQHTEV

SEQ ID NO: 301 - protein, 2871 aa, Homo sapiens
MRRGRLLEIALGFTVLLASYTSHGADANLEAGNVKETRASRAKRRGGGGHDALKGPNVCGSRYNAYCCPGWKTLPGGNQCIVPICRHSCGDGFCSRPNMCTCPSGQIAPSCGSRSIQHCNIRCMNGGSCSDDHCLCQKGYIGTHCGQPVCESGCLNGGRCVAPNRCACTYGFTGPQCERDYRTGPCFTVISNQMCQGQLSGIVCTKTLCCATVGRAWGHPCEMCPAQPHPCRRGFIPNIRTGACQDVDECQAIPGLCQGGNCINTVGSFECKCPAGHKLNEVSQKCEDIDECSTIPGICEGGECTNTVSSYFCKCPPGFYTSPDGTRCIDVRPGYCYTALTNGRCSNQLPQSITKMQCCCDAGRCWSPGVTVAPEMCPIRATEDFNKLCSVPMVIPGRPEYPPPPLGPIPPVLPVPPGFPPGPQIPVPRPPVEYLYPSREPPRVLPVNVTDYCQLVRYLCQNGRCIPTPGSYRCECNKGFQLDLRGECIDVDECEKNPCAGGECINNQGSYTCQCRAGYQSTLTRTECRDIDECLQNGRICNNGRCINTDGSFHCVCNAGFHVTRDGKNCEDMDECSIRNMCLNGMCINEDGSFKCICKPGFQLASDGRYCKDINECETPGICMNGRCVNTDGSYRCECFPGLAVGLDGRVCVDTHMRSTCYGGYKRGQCIKPLFGAVTKSECCCASTEYAFGEPCQPCPAQNSAEYQALCSSGPGMTSAGSDINECALDPDICPNGICENLRGTYKCICNSGYEVDSTGKNCVDINECVLNSLLCDNGQCRNTPGSFVCTCPKGFIYKPDLKTCEDIDECESSPCINGVCKNSPGSFICECSSESTLDPTKTICIETIKGTCWQTVIDGRCEININGATLKSQCCSSLGAAWGSPCTLCQVDPICGKGYSRIKGTQCEDIDECEVFPGVCKNGLCVNTRGSFKCQCPSGMTLDATGRICLDIRLETCFLRYEDEECTLPIAGRHRMDACCCSVGAAWGTEECEECPMRNTPEYEELCPRGPGFATKEITNGKPFFKDINECKMIPSLCTHGKCRNTIGSFKCRCDSGFALDSEERNCTDIDECRISPDLCGRGQCVNTPGDFECKCDEGYESGFMMMKNCMDIDECQRDPLLCRGGVCHNTEGSYRCECPPGHQLSPNISACIDINECELSAHLCPNGRCVNLIGKYQCACNPGYHSTPDRLFCVDIDECSIMNGGCETFCTNSEGSYECSCQPGFALMPDQRSCTDIDECEDNPNICDGGQCTNIPGEYRCLCYDGFMASEDMKTCVDVNECDLNPNICLSGTCENTKGSFICHCDMGYSGKKGKTGCTDINECEIGAHNCGKHAVCTNTAGSFKCSCSPGWIGDGIKCTDLDECSNGTHMCSQHADCKNTMGSYRCLCKEGYTGDGFTCTDLDECSENLNLCGNGQCLNAPGGYRCECDMGFVPSADGKACEDIDECSLPNICVFGTCHNLPGLFRCECEIGYELDRSGGNCTDVNECLDPTTCISGNCVNTPGSYICDCPPDFELNPTRVGCVDTRSGNCYLDIRPRGDNGDTACSNEIGVGVSKASCCCSLGKAWGTPCEMCPAVNTSEYKILCPGGEGFRPNPITVILEDIDECQELPGLCQGGKCINTFGSFQCRCPTGYYLNEDTRVCDDVNECETPGICGPGTCYNTVGNYTCICPPDYMQVNGGNNCMDMRRSLCYRNYYADNQTCDGELLFNMTKKMCCCSYNIGRAWNKPCEQCPIPSTDEFATLCGSQRPGFVIDIYTGLPVDIDECREIPGVCENGVCINMVGSFRCECPVGFFYNDKLLVCEDIDECQNGPVCQRNAECINTAGSYRCDCKPGYRFTSTGQCNDRNECQEIPNICSHGQCIDTVGSFYCLCHTGFKTNDDQTMCLDINECERDACGNGTCRNTIGSFNCRCNHGFILSHNNDCIDVDECASGNGNLCRNGQCINTVGSFQCQCNEGYEVAPDGRTCVDINECLLEPRKCAPGTCQNLDGSYRCICPPGYSLQNEKCEDIDECVEEPEICALGTCSNTEGSFKCLCPEGFSLSSSGRRCQDLRMSYCYAKFEGGKCSSPKSRNHSKQECCCALKGEGWGDPCELCPTEPDEAFRQICPYGSGIIVGPDDSAVDMDECKEPDVCKHGQCINTDGSYRCECPFGYILAGNECVDTDECSVGNPCGNGTCKNVIGGFECTCEEGFEPGPMMTCEDINECAQNPLLCAFRCVNTYGSYECKCPVGYVLREDRRMCKDEDECEEGKHDCTEKQMECKNLIGTYMCICGPGYQRRPDGEGCVDENECQTKPGICENGRCLNTRGSYTCECNDGFTASPNQDECLDNREGYCFTEVLQNMCQIGSSNRNPVTKSECCCDGGRGWGPHCEICPFQGTVAFKKLCPHGRGFMTNGADIDECKVIHDVCRNGECVNDRGSYHCICKTGYTPDITGTSCVDLNECNQAPKPCNFICKNTEGSYQCSCPKGYILQEDGRSCKDLDECATKQHNCQFLCVNTIGGFTCKCPPGFTQHHTSCIDNNECTSDINLCGSKGICQNTPGSFTCECQRGFSLDQTGSSCEDVDECEGNHRCQHGCQNIIGGYRCSCPQGYLQHYQWNQCVDENECLSAHICGGASCHNTLGSYKCMCPAGFQYEQFSGGCQDINECGSAQAPCSYGCSNTEGGYLCGCPPGYFRIGQGHCVSGMGMGRGNPEPPVSGEMDDNSLSPEACYECKINGYPKRGRKRRSTNETDASNIEDQSETEANVSLASWDVEKTAIFAFNISHVSNKVRILELLPALTTLTNHNRYLIESGNEDGFFKINQKEGISYLHFTKKKPVAGTYSLQISSTPLYKKKELNQLEDKYDKDYLSGELGDNLKMKIQVLLH

SEQ ID NO: 302 - protein, 510 aa, Homo sapiens
MATGRGRILQQHWLGLQTLRGPSRGGGAARGRARAFGCRKGPGVKLSAGSAALRCHAGGGQHWESSFSCCSGFLDGMPSEILLKIFSYLDAVSLLCTGCVSRRFYHLANDNFIWIGIYSTAFSPARSNWKFNSVEKIAMSMSFLSVQDKEAGYWKKEYITKQIASVKAALADILKPVNPYTGLPVKTKEALRIFGLGWAIILKEKGGKEYIMEHVDLSINDTSVTVIWYGKKWPCLASLSTLDLCGMTPVFTDWYKTPTKHRLRWHSLIAKYNLSHLTISTMIGCDRLIRIFCLHPGLLVGVWKKEEELAFVMANLHFHHLVERSTLGSATIPYELPPHSPFLDDSPEYGLHGYQLHVDLHSGGVFYLCGTFRNLFTKRGNIENGHVKLIVIHLKNNREHLPLIGKVGLSWKTDIFDGCIKSCSMMDVTLLDEHGKPFWCFSSPVCLRSPATPSDSSSFLGQTYNVDYVDAEGRVHVELVWIRETEEYLIVNLVLYLSIAKINHWFGTEY

SEQ ID NO: 303 - protein, 555 aa, Homo sapiens
MLLFLSVPQPRPPGARTRAGAARVARWRRLRLQQLRRLRGLLRVLRGRPGAGSRRRGRMALCGQAAGAASLPSELIVHIFSFLPAPDRLRASASCSHWRECLFYPALWPQLRICLRVSPAEQPRLEFLMRKCGWFVRELRVEFAAENYLSGGGPGDGGGADTGTGGEEVEALQLSARWLEVLRTYLELVLCVLVSIRNNRNLQKFSLFGDISVLQQQGSLSNTYLSKVDPDGKKIKQIQQLFEEILSNSRQLKWLSCGFMLEIVTPTSLSSLSNAVANTMEHLSLLDNNIPGNSTLITAVELERFVNLHSLALDFCDFTAEMARVLTDSNHVPLQRLSLLVHNVSVMHKSLDNMPNDEHWKALSRKSTSFRVYIMAFDIKSEDMLKILKPSIPLERIHFDSYITCVSGAIVDLISRQYDKFLTHFILMNDVIDTSGFPDLSDNRNEDPLVLLAWRCTKLSLLAIHGYTVWAHNLIAIARLRGSDLKVLEVTEESIDFDQGELADQDVDPVHNLIEQVSLGLGQPWHAVMDIESLSVFTEPNRHFYREMQSFSEDI

SEQ ID NO: 304 - protein, 709 aa, Homo sapiens
MGKARRSPPGHHRHCEGCFNRHCHIPVEPNTSCLVISCHLLCGATFHMCKEAEHQLLCPLEQVPCLNSEYGCPLSMSRHKLAKHLQVCPASVVCCSMEWNRWPNVDSETTLHENIMKETPSEECLDTALALQDQKVLFRSLKMVELFPETREATEEEPTMNGETSVEEMGGAVGGVDIGLVPHGLSATNGEMAELSQEEREVLAKTKEGMDLVKFGQWENIFSKEHAASALTNSSASCESKNKNDSEKEQISSGHNMVEGEGAPKKKEPQENQKQQDVRTAMETTGLAPWQDGVLERLKTAVDAKDYNMYLVHNGRMLIHFGQMPACTPKERDFVYGKLEAQEVKTVYTFKVPVSYCGKRARLGDAMLSCKPSEHKAVDTSDLGITVEDLPKSDLIKTTLQCALERELKGHVISESRSIDGLFMDFATQTYNFEPEQFSSGTVLADLTAATPGGLHVELHSECVTRRHNKSSSAFTFTCNKFFRRDEFPLHFKNVHTDIQSCLNGWFQHRCPLAYLGCTFVQNHFRPPGQKAKVIYSQELKTFAIKPEVAPELSEGRKNNHLLGHGGKSQNSLTSLPLEILKYIAGFLDSVSLAQLSQVSVLMRNICATLLQERGMVLLQWKKKRYSHGGTSWRVHREIWQFSSLFSKIKSWEFNEVTSMSEHLKSCPFNIVEHKTDPILLTSMCQPREQARESLVSTFRIRPRGRYVS

SEQ ID NO: 305 - protein, 822 aa, Homo sapiens
MGFGSDLKNSHEAVLKLQDWELRLLETVKKFMALRIKSDKEYASTLQNLCNQVDKESTVQMNYVSNVSKSWLLMIQQTEQLSRIMKTHAEDLNSGPLHRLTMMIKDKQQVKKSYIGVHQQIEAEMIKVTKTELEKLKCSYRQLIKEMNSAKEKYKEALAKGKETEKAKERYDKATMKLHMLHNQYVLALKGAQLHQNQYYDITLPLLLDSLQKMQEEMIKALKGIFDEYSQITSLVTEEIVNVHKEIQMSVEQIDPSTEYNNFIDVHRTTAAKEQEIEFDTSLLEENENLQANEIMWNNLTAESLQVMLKTLAEELMQTQQMLLNKEEAVLELEKRIEESSETCEKKSDIVLLLSQKQALEELKQSVQQLRCTEAKFSAQKELLEQKVQENDGKEPPPVVNYEEDARSVTSMERKERLSKFESIRHSIAGIIRSPKSALGSSALSDMISISEKPLAEQDWYHGAIPRIEAQELLKKQGDFLVRESHGKPGEYVLSVYSDGQRRHFIIQYVDNMYRFEGTGFSNIPQLIDHHYTTKQVITKKSGVVLLNPIPKDKKWILSHEDVILGELLGKGNFGEVYKGTLKDKTSVAVKTCKEDLPQELKIKFLQEAKILKQYDHPNIVKLIGVCTQRQPVYIIMELVSGGDFLTFLRRKKDELKLKQLVKFSLDAAAGMLYLESKNCIHRDLAARNCLVGENNVLKISDFGMSRQEDGGVYSSSGLKQIPIKWTAPEALNYGRYSSESDVWSFGILLWETFSLGVCPYPGMTNQQAREQVERGYRMSAPQHCPEDISKIMMKCWDYKPENRPKFSELQKELTIIKRKLT

SEQ ID NO: 306 - protein, 459 aa, Homo sapiens
MASSASLETMVPPACPRAGASPATSKTLAFSIERIMAKTSEPRAPFEPRPGALEADGSQGKKLLNLCSPLPCMIPLQPLGYEVPSKTLLSYSELWKSSLRAGGGGGGGGGGGGGGGGAPVCGASGLCKTNCGVCCKAELGLAPSALPAGRVIKPQVINQAVGLPASGSLYYFNYLDSTAYPPSELLSGHLFPSGLLNAQAPAALAAHPKLFLLENAKLAGLAADKFPHPAPYPHKERLPAPLEQVLKENSALTAERGGVKGHSKLPGGSADGKPKNFTCEVCGKVFNAHYNLTRHMPVHTGARPFVCKVCGKGFRQASTLCRHKIIHTQEKPHKCNQCGKAFNRSSTLNTHIRIHAGYKPFVCEFCGKGFHQKGNYKNHKLTHSGEKQYKCTICNKAFHQVYNLTFHMHTHNDKKPFTCATCGKGFCRNFDLKKHVRKLHDSVGPAAPSAKDLTRTVQS

SEQ ID NO: 307 - protein, 866 aa, Homo sapiens
MFSMRIVCLVLSVVGTAWTADSGEGDFLAEGGGVRGPRVVERHQSACKDSDWPFCSDEDWNYKCPSGCRMKGLIDEVNQDFTNRINKLKNSLFEYQKNNKDSHSLTTNIMEILRGDFSSANNRDNTYNRVSEDLRSRIEVLKRKVIEKVQHIQLLQKNVRAQLVDMKRLEVDIDIKIRSCRGSCSRALAREVDLKDYEDQQKQLEQVIAKDLLPSRDRQHLPLIKMKPVPDLVPGNFKSQLQKVPPEWKALTDMPQMRMELERPGGNEITRGGSTSYGTGSETESPRNPSSAGSWNSGSSGPGSTGNRNPGSSGTGGTATWKPGSSGPGSTGSWNSGSSGTGSTGNQNPGSPRPGSTGTWNPGSSERGSAGHWTSESSVSGSTGQWHSESGSFRPDSPGSGNARPNNPDWGTFEEVSGNVSPGTRREYHTEKLVTSKGDKELRTGKEKVTSGSTTTTRRSCSKTVTKTVIGPDGHKEVTKEVVTSEDGSDCPEAMDLGTLSGIGTLDGFRHRHPDEAAFFDTASTGKTFPGFFSPMLGEFVSETESRGSESGIFTNTKESSSHHPGIAEFPSRGKSSSYSKQFTSSTSYNRGDSTFESKSYKMADEAGSEADHEGTHSTKRGHAKSRPVRDCDDVLQTHPSGTQSGIFNIKLPGSSKIFSVYCDQETSLGGWLLIQQRMDGSLNFNRTWQDYKRGFGSLNDEGEGEFWLGNDYLHLLTQRGSVLRVELEDWAGNEAYAEYHFRVGSEAEGYALQVSSYEGTAGDALIEGSVEEGAEYTSHNNMQFSTFDRDADQWEENCAEVYGGGWWYNNCQAANLNGIYYPGGSYDPRNNSPYEIENGVVWVSFRGADYSLRAVRMKIRPLVTQ

SEQ ID NO: 308 - protein, 961 aa, Homo sapiens
MHGHRAPGGAGPSEPEHPATNPPGAAPPACADSDPGASEPGLLARRGSGSALGGPLDPQFVGPSDTSLGAAPGHRVLPCGPSPQHHRALRFSYHLEGSQPRPGLHQGNRILVKSLSLDPGQSLEPHPEGPQRLRSDPGPPTETPSQRPSPLKRAPGPKPQVPPKPSYLQMPRMPPPLEPIPPPPSRPLPADPRVAKGLAPRAEASPSSAAVSSLIEKFEREPVIVASDRPVPGPSPGPPEPVMLPQPTSQPPVPQLPEGEASRCLFLLAPGPRDGEKVPNRDSGIDSISSPSNSEETCFVSDDGPPSHSLCPGPPALASVPVALADPHRPGSQEVDSDLEEEDDEEEEEEKDREIPVPLMERQESVELTVQQKVFHIANELLQTEKAYVSRLHLLDQVFCARLLEEARNRSSFPADVVHGIFSNICSIYCFHQQFLLPELEKRMEEWDRYPRIGDILQKLAPFLKMYGEYVKNFDRAVELVNTWTERSTQFKVIIHEVQKEEACGNLTLQHHMLEPVQRIPRYELLLKDYLLKLPHGSPDSKDAQKSLELIATAAEHSNAAIRKMERMHKLLKVYELLGGEEDIVSPTKELIKEGHILKLSAKNGTTQDRYLILFNDRLLYCVPRLRLLGQKFSVRARIDVDGMELKESSNLNLPRTFLVSGKQRSLELQARTEEEKKDWVQAINSTLLKHEQTLETFKLLNSTNREDEDTPPNSPNVDLGKRAPTPIREKEVTMCMRCQEPFNSITKRRHHCKACGHVVCGKCSEFRARLVYDNNRSNRVCTDCYVALHGVPGSSPACSQHTPQRRRSILEKQASVAAENSVICSFLHYMEKGGKGWHKAWFVVPENEPLVLYIYGAPQDVKAQRSLPLIGFEVGPPEAGERPDRRHVFKITQSHLSWYFSPETEELQRRWMAVLGRAGRGDTFCPGPTLSEDREMEEAPVAALGATAEPPESPQTRDKT

SEQ ID NO: 309 - protein, 258 aa, Homo sapiens
MTPPKLRASLSPSLLLLLSGCLLAAARREKGAASNVAEPVPGPTGGSSGRFLSPEQHACSWQLLLPAPEAAAGSELALRCQSPDGARHQCAYRGHPERCAAYAARRAHFWKQVLGGLRKKRRPCHDPAPLQARLCAGKKGHGAELRLVPRASPPARPTVAGFAGESKPRARNRGRTRERASGPAAGTPPPQSAPPKENPSERKTNEGKRKAALVPNEERPMGTGPDPDGLDGNAELTETYCAEKWHSLCNFFVNFWNG

SEQ ID NO: 310 - protein, 147 aa, Homo sapiens
MSFRFGQHLIKPSVVFLKTELSFALVNRKPVVPGHVLVCPLRPVERFHDLRPDEVADLFQTTQRVGTVVEKHFHGTSLTFSMQDGPEAGQTVKHVHVHVLPRKAGDFHRNDSIYEELQKHDKEDFPASWRSEEEMAAEAAALRVYFQ

SEQ ID NO: 311 - protein, 1338 aa, Homo sapiens
MVSYWDTGVLLCALLSCLLLTGSSSGSKLKDPELSLKGTQHIMQAGQTLHLQCRGEAAHKWSLPEMVSKESERLSITKSACGRNGKQFCSTLTLNTAQANHTGFYSCKYLAVPTSKKKETESAIYIFISDTGRPFVEMYSEIPEIIHMTEGRELVIPCRVTSPNITVTLKKFPLDTLIPDGKRIIWDSRKGFIISNATYKEIGLLTCEATVNGHLYKTNYLTHRQTNTIIDVQISTPRPVKLLRGHTLVLNCTATTPLNTRVQMTWSYPDEKNKRASVRRRIDQSNSHANIFYSVLTIDKMQNKDKGLYTCRVRSGPSFKSVNTSVHIYDKAFITVKHRKQQVLETVAGKRSYRLSMKVKAFPSPEVVWLKDGLPATEKSARYLTRGYSLIIKDVTEEDAGNYTILLSIKQSNVFKNLTATLIVNVKPQIYEKAVSSFPDPALYPLGSRQILTCTAYGIPQPTIKWFWHPCNHNHSEARCDFCSNNEESFILDADSNMGNRIESITQRMAIIEGKNKMASTLVVADSRISGIYICIASNKVGTVGRNISFYITDVPNGFHVNLEKMPTEGEDLKLSCTVNKFLYRDVTWILLRTVNNRTMHYSISKQKMAITKEHSITLNLTIMNVSLQDSGTYACRARNVYTGEEILQKKEITIRDQEAPYLLRNLSDHTVAISSSTTLDCHANGVPEPQITWFKNNHKIQQEPGIILGPGSSTLFIERVTEEDEGVYHCKATNQKGSVESSAYLTVQGTSDKSNLELITLTCTCVAATLFWLLLTLFIRKMKRSSSEIKTDYLSIIMDPDEVPLDEQCERLPYDASKWEFARERLKLGKSLGRGAFGKVVQASAFGIKKSPTCRTVAVKMLKEGATASEYKALMTELKILTHIGHHLNVVNLLGACTKQGGPLMVIVEYCKYGNLSNYLKSKRDLFFLNKDAALHMEPKKEKMEPGLEQGKKPRLDSVTSSESFASSGFQEDKSLSDVEEEEDSDGFYKEPITMEDLISYSFQVARGMEFLSSRKCIHRDLAARNILLSENNVVKICDFGLARDIYKNPDYVRKGDTRLPLKWMAPESIFDKIYSTKSDVWSYGVLLWEIFSLGGSPYPGVQMDEDFCSRLREGMRMRAPEYSTPEIYQIMLDCWHRDPKERPRFAELVEKLGDLLQANVQQDGKDYIPINAILTGNSGFTYSTPAFSEDFFKESISAPKFNSGSSDDVRYVNAFKFMSLERIKTFEELLPNATSMFDDYQGDSSTLLASPMLKRFTWTDSKPKASLKIDLRVTSKSKESGLSDVSRPSFCHSSCGHVSEGKRRFTYDHAELERKIACCSPPPDYNSVVLYSTPPI

SEQ ID NO: 312 - protein, 632 aa, Homo sapiens [sequence omitted]

SEQ ID NO: 313 - protein, 750 aa, Homo sapiens
MWNLLHETDSAVATARRPRWLCAGALVLAGGFFLLGFLFGWFIKSSNEATNITPKHNMKAFLDELKAENIKKFLYNFTQIPHLAGTEQNFQLAKQIQSQWKEFGLDSVELAHYDVLLSYPNKTHPNYISIINEDGNEIFNTSLFEPPPPGYENVSDIVPPFSAFSPQGMPEGDLVYVNYARTEDFFKLERDMKINCSGKIVIARYGKVFRGNKVKNAQLAGAKGVILYSDPADYFAPGVKSYPDGWNLPGGGVQRGNILNLNGAGDPLTPGYPANEYAYRRGIAEAVGLPSIPVHPIGYYDAQKLLEKMGGSAPPDSSWRGSLKVPYNVGPGFTGNFSTQKVKMHIHSTNEVTRIYNVIGTLRGAVEPDRYVILGGHRDSWVFGGIDPQSGAAVVHEIVRSFGTLKKEGWRPRRTILFASWDAEEFGLLGSTEWAEENSRLLQERGVAYINADSSIEGNYTLRVDCTPLMYSLVHNLTKELKSPDEGFEGKSLYESWTKKSPSPEFSGMPRISKLGSGNDFEVFFQRLGIASGRARYTKNWETNKFSGYPLYHSVYETYELVEKFYDPMFKYHLTVAQVRGGMVFELANSIVLPFDCRDYAVVLRKYADKIYSISMKHPQEMKTYSVSFDSLFSAVKNFTEIASKFSERLQDFDKSNPIVLRMMNDQLMFLERAFIDPLGLPDRPFYRHVIYAPSSHNKYAGESFPGIYDALFDIESKVDPSKAWGEVKRQIYVAAFTVQAAAETLSEVA

SEQ ID NO: 314 - protein, 489 aa, Homo sapiens [sequence omitted]

SEQ ID NO: 315 - protein, 693 aa, Homo sapiens
MMQESGTETKSNGSAIQNGSGGSNHLLECGGLREGRSNGETPAVDIGAADLAHAQQQQQQALQVARQLLLQQQQQQQVSGLKSPKRNDKQPALQVPVSVAMMTPQVITPQQMQQILQQQVLSPQQLQVLLQQQQALMLQQQQLQEFYKKQQEQLQLQLLQQQHAGKQPKEQQQVATQQLAFQQQLLQMQQLQQQHLLSLQRQGLLTIQPGQPALPLQPLAQGMIPTELQQLWKEVTSAHTAEETTGNNHSSLDLTTTCVSSSAPSKTSLIMNPHASTNGQLSVHTPKRESLSHEEHPHSHPLYGHGVCKWPGCEAVCEDFQSFLKHLNSEHALDDRSTAQCRVQMQVVQQLELQLAKDKERLQAMMTHLHVKSTEPKAAPQPLNLVSSVTLSKSASEASPQSLPHTPTTPTAPLTPVTQGPSVITTTSMHTVGPIRRRYSDKYNVPISSADIAQNQEFYKNAEVRPPFTYASLIRQAILESPEKQLTLNEIYNWFTRMFAYFRRNAATWKGAIRTNLSLHKCFIRVEDEFGSFWTVDDEEFKRGRHIQRGRPRKYCPDENFDELVAHNPSLIKNMQSSHAYCTPLNAALQASMAENSIPLYTTASMGNPTLGNLASAIREELNGAMEHTNSNESDSSPGRSPMQAVHPVHVKEEPLDPEEAEGPLSLVTTANHSPDFDHDRDYEDEPVNEDME

SEQ ID NO: 316 - protein, 740 aa, Homo sapiens
MMQESATETISNSSMNQNGMSTLSSQLDAGSRDGRSSGDTSSEVSTVELLHLQQQQALQAARQLLLQQQTSGLKSPKSSDKQRPLQELLPETKLCICGHSSGDGHPHNTFAVPVSVAMMTPQVITPQQMQQILQQQVLSPQQLQALLQQQQAVMLQQQQLQEFYKKQQEQLHLQLLQQQQQQQQQQQQQQQQQQQQQQQQQQQQQQQQQQQQQQQQHPGKQAKEQQQQQQQQQQLAAQQLVFQQQLLQMQQLQQQQHLLSLQRQGLISIPPGQAALPVQSLPQAGLSPAEIQQLWKEVTGVHSMEDNGIKHGGLDLTTNNSSSTTSSNTSKASPPITHHSIVNGQSSVLSARRDSSSHEETGASHTLYGHGVCKWPGCESICEDFGQFLKHLNNEHALDDRSTAQCRVQMQVVQQLEIQLSKERERLQAMMTHLHMRPSEPKPSPKPLNLVSSVTMSKNMLETSPQSLPQTPTTPTAPVTPITQGPSVITPASVPNVGAIRRRHSDKYNIPMSSEIAPNYEFYKNADVRPPFTYATLIRQAIMESSDRQLTLNEIYSWFTRTFAYFRRNAATWKNAVRHNLSLHKCFVRVENVKGAVWTVDEVEYQKRRSQKITGSPTLVKNIPTSLGYGAALNASLQAALAESSLPLLSNPGLINNASSGLLQAVHEDLNGSLDHIDSNGNSSPGCSPQPHIHSIHVKEEPVIAEDEDCPMSLVTTANHSPELEDDREIEEEPLSEDLE

SEQ ID NO: 317 - protein, 505 aa, Homo sapiens
MSNICQRLWEYLEPYLPCLSTEADKSTVIENPGALCSPQSQRHGHYFVALFDYQARTAEDLSFRAGDKLQVLDTLHEGWWFARHLEKRRDGSSQQLQGYIPSNYVAEDRSLQAEPWFFGAIGRSDAEKQLLYSENKTGSFLIRESESQKGEFSLSVLDGAVVKHYRIKRLDEGGFFLTRRRIFSTLNEFVSHYTKTSDGLCVKLGKPCLKIQVPAPFDLSYKTVDQWEIDRNSIQLLKRLGSGQFGEVWEGLWNNTTPVAVKTLKPGSMDPNDFLREAQIMKNLRHPKLIQLYAVCTLEDPIYIITELMRHGSLQEYLQNDTGSKIHLTQQVDMAAQVASGMAYLESRNYIHRDLAARNVLVGEHNIYKVADFGLARVFKVDNEDIYESRHEIKLPVKWTAPEAIRSNKFSIKSDVWSFGILLYEIITYGKMPYSGMTGAQVIQMLAQNYRLPQPSNCPQQFYNIMLECWNAEPKERPTFETLRWKLEDYFETDSSYSDANNFIR

SEQ ID NO: 318 - protein, 1322 aa, Homo sapiens
MDVFSFVKIAKLSSHRTKSSGWPPPSGTWGLSQVPPYGWEMTANRDGRDYFINHMTQAIPFDDPRLESCQIIPPAPRKVEMRRDPVLGFGFVAGSEKPVVVRSVTPGGPSEGKLIPGDQIVMINDEPVSAAPRERVIDLVRSCKESILLTVIQPYPSPKSAFISAAKKARLKSNPVKVRFSEEVIINGQVSETVKDNSLLFMPNVLKVYLENGQTKSFRFDCSTSIKDVILTLQEKLSIKGIEHFSLMLEQRTEGAGTKLLLLHEQETLTQVTQRPSSHKMRCLFRISFVPKDPIDLLRRDPVAFEYLYVQSCNDVVQERFGPELKYDIALRLAALQMYIATVTTKQTQKISLKYIEKEWGLETFLPSAVLQSMKEKNIKKALSHLVKANQNLVPPGKKLSALQAKVHYLKFLSDLRLYGGRVFKATLVQAEKRSEVTLLVGPRYGISHVINTKTNLVALLADFSHVNRIEMFSEEESLVRVELHVLDVKPITLLMESSDAMNLACLTAGYYRLLVDSRRSIFNMANKKNTATQETGPENKGKHNLLGPDWNCIPQMTTFIGEGEQEAQITYIDSKQKTVEITDSTMCPKEHRHLYIDNAYSSDGLNQQLSQPGEAPCEADYRSLAQRSLLTLSGPETLKKAQESPRGAKVSFIFGDFALDDGISPPTLGYETLLDEGPEMLEKQRNLYIGSANDMKGLDLTPEAEGIQFVENSVYANIGDVKSFQAAEGIEEPLLHDICYAENTDDAEDEDEVSCEEDLVVGEMNQPAILNLSGSSDDIIDLTSLPPPEGDDNEDDFLLRSLNMAIAAPPPGFRDSSDEEDSQSQAASFPEDKEKGSSLQNDEIPVSLIDAVPTSAEGKCEKGLDNAVVSTLGALEALSVSEEQQTSDNSGVAILRAYSPESSSDSGNETNSSEMTESSELATAQKQSENLSRMFLATHEGYHPLAEEQTEFPASKTPAGGLPPKSSHALAARPATDLPPKVVPSKQLLHSDHMEMEPETMETKSVTDYFSKLHMGSVAYSCTSKRKSKLADGEGKAPPNGNTTGKKQQGTKTAEMEEEASGKFGTVSSRDSQHLSTFNLERTAFRKDSQRWYVATEGGMAEKSGLEAATGKTFPRASGLGAREAEGKEEGAPDGETSDGSGLGQGDRFLTDVTCASSAKDLDNPEDADSSTCDHPSKLPEADESVARLCDYHLAKRMSSLQSEGHFSLQSSQGSSVDAGCGTGSSGSACATPVESPLCPSLGKHLIPDASGKGVNYIPSEERAPGLPNHGATFKELHPQTEGMCPRMTVPALHTAINTEPLFGTLRDGCHRLPKIKETTV

SEQ ID NO: 319 - protein, 456 aa, Homo sapiens
MRKSPGLSDCLWAWILLLSTLTGRSYGQPSLQDELKDNTTVFTRILDRLLDGYDNRLRPGLGERVTEVKTDIFVTSFGPVSDHDMEYTIDVFFRQSWKDERLKFKGPMTVLRLNNLMASKIWTPDTFFHNGKKSVAHNMTMPNKLLRITEDGTLLYTMRLTVRAECPMHLEDFPMDAHACPLKFGSYAYTRAEVVYEWTREPARSVVVAEDGSRLNQYDLLGQTVDSGIVQSSTGEYVVMTTHFHLKRKIGYFVIQTYLPCIMTVILSQVSFWLNRESVPARTVFGVTTVLTMTTLSISARNSLPKVAYATAMDWFIAVCYAFVFSALIEFATVNYFTKRGYAWDGKSVVPEKPKKVKDPLIKKNNTYAPTATSYTPNLARGDPGLATIAKSATIEPKEVKPETKPPEPKKTFNSVSKIDRLSRIAFPLLFGIFNLVYWATYLNREPQLKAPTPHQ

SEQ ID NO: 320 - protein, 492 aa, Homo sapiens
MIITQTSHCYMTSLGILFLINILPGTTGQGESRRQEPGDFVKQDIGGLSPKHAPDIPDDSTDNITIFTRILDRLLDGYDNRLRPGLGDAVTEVKTDIYVTSFGPVSDTDMEYTIDVFFRQTWHDERLKFDGPMKILPLNNLLASKIWTPDTFFHNGKKSVAHNMTTPNKLLRLVDNGTLLYTMRLTIHAECPMHLEDFPMDVHACPLKFGSYAYTTAEVVYSWTLGKNKSVEVAQDGSRLNQYDLLGHVVGTEIIRSSTGEYVVMTTHFHLKRKIGYFVIQTYLPCIMTVILSQVSFWLNRESVPARTVFGVTTVLTMTTLSISARNSLPKVAYATAMDWFIAVCYAFVFSALIEFATVNYFTKRSWAWEGKKVPEALEMKKKTPAAPAKKTSTTFNIVGTTYPINLAKDTEFSTISKGAAPSASSTPTIIASPKATYVQDSPTETKTYNSVSKVDKISRIIFPVLFAIFNLVYWATYVNRESAIKGMIRKQ

SEQ ID NO: 321 - protein, 554 aa, Homo sapiens [sequence omitted]

SEQ ID NO: 322 - protein, 462 aa, Homo sapiens
MDNGMFSGFIMIKNLLLFCISMNLSSHFGFSQMPTSSVKDETNDNITIFTRILDGLLDGYDNRLRPGLGERITQVRTDIYVTSFGPVSDTEMEYTIDVFFRQSWKDERLRFKGPMQRLPLNNLLASKIWTPDTFFHNGKKSIAHNMTTPNKLLRLEDDGTLLYTMRLTISAECPMQLEDFPMDAHACPLKFGSYAYPNSEVVYVWTNGSTKSVVVAEDGSRLNQYHLMGQTVGTENISTSTGEYTIMTAHFHLKRKIGYFVIQTYLPCIMTVILSQVSFWLNRESVPARTVFGVTTVLTMTTLSISARNSLPKVAYATAMDWFIAVCYAFVFSALIEFATVNYFTKRGWAWDGKKALEAAKIKKKREVILNKSTNAFTTGKMSHPPNIPKEQTPAGTSNTTSVSVKPSEEKTSESKKTYNSISKIDKMSRIVFPVLFGTFNLVYWATYLNREPVIKGAASPK

SEQ ID NO: 323 - protein, 474 aa, Homo sapiens
MWTVQNRESLGLLSFPVMITMVCCAHSTNEPSNMSYVKETVDRLLKGYDIRLRPDFGGPPVDVGMRIDVASIDMVSEVNMDYTLTMYFQQSWKDKRLSYSGIPLNLTLDNRVADQLWVPDTYFLNDKKSFVHGVTVKNRMIRLHPDGTVLYGLRITTTAACMMDLRRYPLDEQNCTLEIESYGYTTDDIEFYWNGGEGAVTGVNKIELPQFSIVDYKMVSKKVEFTTGAYPRLSLSFRLKRNIGYFILQTYMPSTLITILSWVSFWINYDASAARVALGITTVLTMTTISTHLRETLPKIPYVKAIDIYLMGCFVFVFLALLEYAFVNYIFFGKGPQKKGASKQDQSANEKNKLEMNKVQVDAHGNILLSTLEIRNETSGSEVLTSVSDPKATMYSYDSASIQYRKPLSSREAYGRALDRHGVPSKGRIRRRASQLKVKIPDLTDVNSIDKWSRMFFPITFSLFNVVYWLYYVH

SEQ ID NO: 324 - protein, 473 aa, Homo sapiens
MCSGLLELLLPIWLSWTLGTRGSEPRSVNDPGNMSFVKETVDKLLKGYDIRLRPDFGGPPVCVGMNIDIASIDMVSEVNMDYTLTMYFQQYWRDKRLAYSGIPLNLTLDNRVADQLWVPDTYFLNDKKSFVHGVTVKNRMIRLHPDGTVLYGLRITTTAACMMDLRRYPLDEQNCTLEIESYGYTTDDIEFYWRGGDKAVTGVERIELPQFSIVEHRLVSRNVVFATGAYPRLSLSFRLKRNIGYFILQTYMPSILITILSWVSFWINYDASAARVALGITTVLTMTTINTHLRETLPKIPYVKAIDMYLMGCFVFVFLALLEYAFVNYIFFGRGPQRQKKLAEKTAKAKNDRSKSESNRVDAHGNILLTSLEVHNEMNEVSGGIGDTRNSAISFDNSGIQYRKQSMPREGHGRFLGDRSLPHKKTHLRRRSSQLKIKIPDLTDVNAIDRWSRIVFPFTFSLFNLVYWLYYVN

SEQ ID NO: 325 - protein, 632 aa, Homo sapiens
MGIRGMLRAAVILLLIRTWLAEGNYPSPIPKFHFEFSSAVPEVVLNLFNCKNCANEAVVQKILDRVLSRYDVRLRPNFGGAPVPVRISIYVTSIEQISEMNMDYTITMFFHQTWKDSRLAYYETTLNLTLDYRMHEKLWVPDCYFLNSKDAFVHDVTVENRVFQLHPDGTVRYGIRLTTTAACSLDLHKFPMDKQACNLVVESYGYTVEDIILFWDDNGNAIHMTEELHIPQFTFLGRTITSKEVYFYTGSYIRLILKFQVQREVNSYLVQVYWPTVLTTITSWISFWMNYDSSAARVTIGLTSMLILTTIDSHLRDKLPNISCIKAIDIYILVCLFFVFLSLLEYVYINYLFYSRGPRRQPRRHRRPRRVIARYRYQQVVVGNVQDGLINVEDGVSSLPITPAQAPLASPESLGSLTSTSEQAQLATSESLSPLTSLSGQAPLATGESLSDLPSTSEQARHSYGVRFNGFQADDSIFPTEIRNRVEAHGHGVTHDHEDSNESLSSDERHGHGPSGKPMLHHGEKGVQEAGWDLDDNNDKSDCLAIKEQFKCDTNSTWGLNDDELMAHGQEKDSSSESEDSCPPSPGCSFTEGFSFDLFNPDYVPKVDKWSRFLFPLAFGLFNIVYWVYHMY

SEQ ID NO: 326 - protein, 594 aa, Homo sapiens
MASSTPSSSATSSNAGADPNTTNLRPTTYDTWCGVAHGCTRKLGLKICGFLQRTNSLEEKSRLVSAFKERQSSKNLLSCENSDRDARFRRTETDFSNLFARDLLPAKNGEEQTVQFLLEVVDILLNYVRKTFDRSTKVLDFHHPHQLLEGMEGFNLELSDHPESLEQILVDCRDTLKYGVRTGHPRFFNQLSTGLDIIGLAGEWLTSTANTNMFTYEIAPVFVLMEQITLKKMREIVGWSSKDGDGIFSPGGAISNMYSIMAARYKYFPEVKTKGMAAVPKLVLFTSEQSHYSIKKAGAALGFGTDNVILIKCNERGKIIPADFEAKILEAKQKGYVPFYVNATAGTTVYGAFDPIQEIADICEKYNLWLHVDAAWGGGLLMSRKHRHKLNGIERANSVTWNPHKMMGVLLQCSAILVKEKGILQGCNQMCAGYLFQPDKQYDVSYDTGDKAIQCGRHVDIFKFWLMWKAKGTVGFENQINKCLELAEYLYAKIKNREEFEMVFNGEPEHTNVCFWYIPQSLRGVPDSPQRREKLHKVAPKIKALMMESGTTMVGYQPQGDKANFFRMVISNPAATQSDIDFLIEEIERLGQDL

SEQ ID NO: 327 - protein, 160 aa, Homo sapiens
MTLEELVACDNAAQKMQTVTAAVEELLVAAQRQDRLTVGVYESAKLMNVDPDSVVLCLLAIDEEEEDDIALQIHFTLIQSFCCDNDINIVRVSGMQRLAQLLGEPAETQGTTEARDLHCLLVTNPHTDAWKSHGLVEVASYCEESRGNNQWVPYISLQER

SEQ ID NO: 328 - protein, 556 aa, Homo sapiens
MRRFVYCKVVLATSLMWVLVDVFLLLYFSECNKCDDKKERSLLPALRAVISRNQEGPGEMGKAVLIPKDDQEKMKELFKINQFNLMASDLIALNRSLPDVRLEGCKTKVYPDELPNTSVVIVFHNEAWSTLLRTVYSVINRSPHYLLSEVILVDDASERDFLKLTLENYVKNLEVPVKIIRMEERSGLIRARLRGAAASKGQVITFLDAHCECTLGWLEPLLARIKEDRKTVVCPIIDVISDDTFEYMAGSDMTYGGFNWKLNFRWYPVPQREMDRRKGDRTLPVRTPTMAGGLFSIDRNYFEEIGTYDAGMDIWGGENLEMSFRIWQCGGSLEIVTCSHVGHVFRKATPYTFPGGTGHVINKNNRRLAEVWMDEFKDFFYIISPGVVKVDYGDVSVRKTLRENLKCKPFSWYLENIYPDSQIPRRYYSLGEIRNVETNQCLDNMGRKENEKVGIFNCHGMGGNQVFSYTADKEIRTDDLCLDVSRLNGPVIMLKCHHMRGNQLWEYDAERLTLRHVNSNQCLDEPSEEDKMVPTMQDCSGSRSQQWLLRNMTLGT

SEQ ID NO: 329 - protein, 557 aa, Homo sapiens
MRRLTRRLVLPVFGVLWITVLLFFWVTKRKLEVPTGPEVQTPKVWSLFFKVAGMSPWAPQVPVSPTPPYQRGHLPTGGHLAVCHFPCLLQEAQFHLQTQVFLQVRCTLLVYCTDLPPTSIIITFHNEARSTLLRTIRSVLNRTPTHLIREIILVDDFSNDPDDCKQLIKLPKVKCLRNNERQGLVRSRIRGADIAQGTTLTFLDSHCEVNRDWLQPLLHRVKEDYTRVVCPVIDIINLDTFTYIESASELRGGFDWSLHFQWEQLSPEQKARRLDPTEPIRTPIIAGGLFVIDKAWFDYLGKYDMDMDIWGGENFEISFRVWMCGGSLEIVPCSRVGHVFRKKHPYVFPDGNANTYIKNTKRTAEVWMDEYKQYYYAARPFALERPFGNVESRLDLRKNLRCQSFKWYLENIYPELSIPKESSIQKGNIRQRQKCLESQRQNNQETPNLKLSPCAKVKGEDAKSQVWAFTYTQQILQEELCLSVITLFPGAPVVLVLCKNGDDRQQWTKTGSHIEHIASHLCLDTDMFGDGTENGKEIVVNPCESSLMSQHWDMVSS

SEQ ID NO: 330 - protein, 597 aa, Homo sapiens
MAEGSAVSDPQHAARLLRALSSFREESRFCDAHLVLDGEEIPVQKNILAAASPYIRTKLNYNPPKDDGSTYKIELEGISVMVMREILDYIFSGQIRLNEDTIQDVVQAADLLLLTDLKTLCCEFLEGCIAAENCIGIRDFALHYCLHHVHYLATEYLETHFRDVSSTEEFLELSPQKLKEVISLEKLNVGNERYVFEAVIRWIAHDTEIRKVHMKDVMSALWVSGLDSSYLREQMLNEPLVREIVKECSNIPLSQPQQGEAMLANFKPRGYSECIVTVGGEERVSRKPTAAMRCMCPLYDPNRQLWIELAPLSMPRINHGVLSAEGFLFVFGGQDENKQTLSSGEKYDPDANTWTALPPMNEARHNFGIVEIDGMLYILGGEDGEKELISMECYDIYSKTWTKQPDLTMVRKIGCYAAMKKKIYAMGGGSYGKLFESVECYDPRTQQWTAICPLKERRFGAVACGVAMELYVFGGVRSREDAQGSEMVTCKSEFYHDEFKRWIYLNDQNLCIPASSSFVYGAVPIGASIYVIGDLDTGTNYDYVREFKRSTGTWHHTKPLLPSDLRRTGCAALRIANCKLFRLQLQQGLFRIRVHSP

SEQ ID NO: 331 - protein, 274 aa, Homo sapiens
MTKSCSELCHPALHFLPCLGGLRKNLQRAVRPSPYSLGFLTFWISRVEKNDDDQKIEQDGIKPEDKAHKAATKIQASFRGHITRKKLKGEKKDDVQAAEAEANKKDEAPVADGVEKKGEGTTTAEAAPATGSKPDEPGKAGETPSEEKKGEGDAATEQAAPQAPASSEEKAGSAETESATKASTDNSPSSKAEDAPAKEEPKQADVPAAVTAAAATTPAAEDAAAKATAQPPTETGESSQAEENIEAVDETKPKESARQDEGKEEEPEADQEHA

SEQ ID NO: 332 - protein, 313 aa, Homo sapiens
MCTALSPKVRSGPGLSDMHQYSQWLASRHEANLLPMKEDLALWLTNLLGKEITAETFMEKLDNGALLCQLAETMQEKFKESMDANKPTKNLPLKKIPCKTSAPSGSFFARDNTANFLSWCRDLGVDETCLFESEGLVLHKQPREVCLCLLELGRIAARYGVEPPGLIKLEKEIEQEETLSAPSPSPSPSSKSSGKKSTGNLLDDAVKRISEDPPCKCPNKFCVERLSQGRYRVGEKILFIRMLHNKHVMVRVGGGWETFAGYLLKHDPCRMLQISRVDGKTSPIQSKSPTLKDMNPDNYLVVSASYKAKKEIK

SEQ ID NO: 333 - protein, 423 aa, Homo sapiens
MLRVRCLRGGSRGAEAVHYIGSRLGRTLTGWVQRTFQSTQAATASSRNSCAADDKATEPLPKDCPVSSYNEWDPLEEVIVGRAENACVPPFTIEVKANTYEKYWPFYQKQGGHYFPKDHLKKAVAEIEEMCNILKTEGVTVRRPDPIDWSLKYKTPDFESTGLYSAMPRDILIVVGNEIIEAPMAWRSRFFEYRAYRSIIKDYFHRGAKWTTAPKPTMADELYNQDYPIHSVEDRHKLAAQGKFVTTEFEPCFDAADFIRAGRDIFAQRSQVTNYLGIEWMRRHLAPDYRVHIISFKDPNPMHIDATFNIIGPGIVLSNPDRPCHQIDLFKKAGWTIITPPTPIIPDDHPLWMSSKWLSMNVLMLDEKRVMVDANEVPIQKMFEKLGITTIKVNIRNANSLGGGFHCWTCDVRRRGTLQSYLD

SEQ ID NO: 334 - protein, 471 aa, Homo sapiens
MCAAQMPPLAHIFRGTFVHSTWTCPMEVLRDHLLGVSDSGKIVFLEEASQQEKLAKEWCFKPCEIRELSHHEFFMPGLVDTHIHASQYSFAGSSIDLPLLEWLTKYTFPAEHRFQNIDFAEEVYTRVVRRTLKNGTTTACYFATIHTDSSLLLADITDKFGQRAFVGKVCMDLNDTFPEYKETTEESIKETERFVSEMLQKNYSRVKPIVTPRFSLSCSETLMGELGNIAKTRDLHIQSHISENRDEVEAVKNLYPSYKNYTSVYDKNNLLTNKTVMAHGCYLSAEELNVFHERGASIAHCPNSNLSLSSGFLNVLEVLKHEVKIGLGTDVAGGYSYSMLDAIRRAVMVSNILLINKVNEKSLTLKEVFRLATLGGSQALGLDGEIGNFEVGKEFDAILINPKASDSPIDLFYGDFFGDISEAVIQKFLYLGDDRNIEEVYVGGKQVVPFSSSVKETIHLPASSPHPPPFP

SEQ ID NO: 335 - protein, 1035 aa, Homo sapiens
MAAETLNFGPEWLRALSGGGSVASPPPSPAMPKYKLADYRYGREEMLALYVKENKVPEELQDKEFAAVLQDEPLQPLALEPLTEEEQRNFSLSVNSVAVLRLMGKGAGPPLAGTSRGRGSTRSRGRGRGDSCFYQRSIEEGDGAFGRSPREIQRSQSWDDRGERRFEKSARRDGARCGFEEGGAGPRKEHARSDSENWRSLREEQEEEEEGSWRLGAGPRRDGDRWRSASPDGGPRSAGWREHGERRRKFEFDLRGDRGGCGEEEGRGGGGSSHLRRCRAPEGFEEDKDGLPEWCLDDEDEEMGTFDASGAFLPLKKGPKEPIPEEQELDFQGLEEEEEPSEGLEEEGPEAGGKELTPLPPQEEKSSSPSPLPTLGPLWGTNGDGDETAEKEPPAAEDDIRGIQLSPGVGSSAGPPGDLEDDEGLKHLQQEAEKLVASLQDSSLEEEQFTAAMQTQGLRHSAAATALPLSHGAARKWFYKDPQGEIQGPFTTQEMAEWFQAGYFSMSLLVKRGCDEGFQPLGEVIKMWGRVPFAPGPSPPPLLGNMDQERLKKQQELAAAALYQQLQHQQFLQLVSSRQLPQCALREKAALGDLTPPPPPPPQQQQQQLTAFLQQLQALKPPRGGDQNLLPTMSRSLSVPDSGRLWDVHTSASSQSGGEASLWDIPINSSTQGPILEQLQLQHKFQERREVELRAKREEEERKRREEKRRQQQQEEQKRRQEEEELFRRKHVRQQELLLKLLQQQQAVPVPPAPSSPPPLWAGLAKQGLSMKTLLELQLEGERQLHKQPPPREPARAQAPNHRVQLGGLGTAPLNQWVSEAGPLWGGPDKSGGGSSGLGLWEDTPKSGGSLVRGLGLKNSRSSPSLSDSYSHLSGRPIRKKTEEEEKLLKLLQGIPRPQDGFTQWCEQMLHTLSATGSLDVPMAVAILKEVESPYDVHDYIRSCLGDTLEAKEFAKQFLERRAKQKASQQRQQQQEAWLSSASLQTAFQANHSTKLGPGEGSKAKRRALMLHSDPSILGYSLHGSSGEIESVDDY

SEQ ID NO: 336 - protein, 1320 aa, Homo sapiens
MAAETQTLNFGPEWLRALSSGGSITSPPLSPALPKYKLADYRYGREEMLALFLKDNKIPSDLLDKEFLPILQEEPLPPLALVPFTEEEQRNFSMSVNSAAVLRLTGRGGGGTVVGAPRGRSSSRGRGRGRGECGFYQRSFDEVEGVFGRGGGREMHRSQSWEERGDRRFEKPGRKDVGKKNGYYCMYSPVLLLGQPLCQGRPNFEEGGPTSVGRKHEFIRSESENWRIFREEQNGEDEDGGWRLAGSRRDGERWRPHSPDGPRSAGWREHMERRRRFEFDFRDRDDERGYRRVRSGSGSIDDDRDSLPEWCLEDAEEEMGTFDSSGAFLSLKKVQKEPIPEEQEMDFRPVDEGEECSDSEGSHNEEAKEPDKTNKKEGEKTDRVGVASEETPQTSSSSARPGTPSDHQSQEASQFERKDEPKTEQTEKAEEETRMENSLPAKVPSRGDEMVADVQQPLSQIPSDTASPLLILPPPVPNPSPTLRPVETPVVGAPGMGSVSTEPDDEEGLKHLEQQAEKMVAYLQDSALDDERLASKLQEHRAKGVSIPLMHEAMQKWYYKDPQGEIQGPFNNQEMAEWFQAGYFTMSLLVKRACDESFQPLGDIMKMWGRVPFSPGPAPPPHMGELDQERLTRQQELTALYQMQHLQYQQFLIQQQYAQVLAQQQKAALSSQQQQQLALLLQQFQTLKMRISDQNIIPSVTRSVSVPDTGSIWELQPTASQPTVWEGGSVWDLPLDTTTPGPALEQLQQLEKAKAAKLEQERREAEMRAKREEEERKRQEELRRQQEEILRRQQEEERKRREEEELARRKQEEALRRQREQEIALRRQREEEERQQQEEALRRLEERRREEEERRKQEELLRKQEEEAAKWAREEEEAQRRLEENRLRMEEEAARLRHEEEERKRKELEVQRQKELMRQRQQQQEALRRLQQQQQQQQLAQMKLPSSSTWGQQSNTTACQSQATLSLAEIQKLEEERERQLREEQRRQQRELMKALQQQQQQQQQKLSGWGNVSKPSGTTKSLLEIQQEEARQMQKQQQQQQQHQQPNRARNNTHSNLHTSIGNSVWGSINTGPPNQWASDLVSSIWSNADTKNSNMGFWDDAVKEVGPRNSTNKNKNNASLSKSVGVSNRQNKKVEEEEKLLKLFQGVNKAQDGFTQWCEQMLHALNTANNLDVPTFVSFLKEVESPYEVHDYIRAYLGDTSEAKEFAKQFLERRAKQKANQQRQQQQLPQQQQQQPPQQPPQQPQQQDSVWGMNHSTLHSVFQTNQSNNQQSNFEAVQSGKKKKKQKMVRADPSLLGFSVNASSERLNMGEIETLDDY

SEQ ID NO: 337 - protein, 620 aa, Homo sapiens
MAEARTSLSAHCRGPLATGLHPDLDLPGRSLATPAPSCYLLGSEPSSGLGLQPETHLPEGSLKRCCVLGLPPTSPASSSPCASSDVTSIIRSSQTSLVTCVNGLRSPPLTGDLGGPSKRARPGPASTDSHEGSLQLEACRKASFLKQEPADEFSELFGPHQQGLPPPYPLSQLPPGPSLGGLGLGLAGRVVAGRQACRWVDCCAAYEQQEELVRHIEKSHIDQRKGEDFTCFWAGCVRRYKPFNARYKLLIHMRVHSGEKPNKCMFEGCSKAFSRLENLKIHLRSHTGEKPYLCQHPGCQKAFSNSSDRAKHQRTHLDTKPYACQIPGCSKRYTDPSSLRKHVKAHSAKEQQVRKKLHAGPDTEADVLTECLVLQQLHTSTQLAASDGKGGCGLGQELLPGVYPGSITPHNGLASGLLPPAHDVPSRHHPLDATTSSHHHLSPLPMAESTRDGLGPGLLSPIVSPLKGLGPPPLPPSSQSHSPGGQPFPTLPSKPSYPPFQSPPPPPLPSPQGYQGSFHSIQSCFPYGDCYRMAEPAAGGDGLVGETHGFNPLRPNGYHSLSTPLPATGYEALAEASCPTALPQQPSEDVVSSGPEDCGFFPNGAFDHCLGHIPSIYTDT

SEQ ID NO: 338 - protein, 184 aa, Homo sapiens
MAEPQPPSGGLTDEAALSCCSDADPSTKDFLLQQTMLRVKDPKKSLDFYTRVLGMTLIQKCDFPIMKFSLYFLAYEDKNDIPKEKDEKIAWALSRKATLELTHNWGTEDDETQSYHNGNSDPRGFGHIGIAVPDVYSACKRFEELGVKFVKKPDDGKMKGLAFIQDPDGYWIEILNPNKMATLM

SEQ ID NO: 339 - protein, 452 aa, Homo sapiens [sequence omitted]

SEQ ID NO: 340 - protein, 355 aa, Homo sapiens
MAGCCCLSAEEKESQRISAEIERQLRRDKKDARRELKLLLLGTGESGKSTFIKQMRIIHGSGYSDEDRKGFTKLVYQNIFTAMQAMIRAMDTLRIQYVCEQNKENAQIIREVEVDKVSMLSREQVEAIKQLWQDPGIQECYDRRREYQLSDSAKYYLTDIDRIATPSFVPTQQDVLRVRVPTTGIIEYPFDLENIIFRMVDVGGQRSERRKWIHCFESVTSIIFLVALSEYDQVLAECDNENRMEESKALFKTIITYPWFLNSSVILFLNKKDLLEEKIMYSHLISYFPEYTGPKQDVRAARDFILKLYQDQNPDKEKVIYSHFTCATDTDNIRFVFAAVKDTILQLNLREFNLV

SEQ ID NO: 341 - protein, 1037 aa, Homo sapiens
MGVRNCLYGNNMSGQRDIPPEIGEQPEQPPLEAPGAAAPGAGPSPAEEMETEPPHNEPIPVENDGEACGPPEVSRPNFQVLNPAFREAGAHGSYSPPPEEAMPFEAEQPSLGGFWPTLEQPGFPSGVHAGLEAFGPALMEPGAFSGARPGLGGYSPPPEEAMPFEFDQPAQRGCSQLLLQVPDLAPGGPGAAGVPGAPPEEPQALRPAKAGSRGGYSPPPEETMPFELDGEGFGDDSPPPGLSRVIAQVDGSSQFAAVAASSAVRLTPAANAPPLWVPGAIGSPSQEAVRPPSNFTGSSPWMEISGPPFEIGSAPAGVDDTPVNMDSPPIALDGPPIKVSGAPDKRERAERPPVEEEAAEMEGAADAAEGGKVPSPGYGSPAAGAASADTAARAAPAAPADPDSGATPEDPDSGTAPADPDSGAFAADPDSGAAPAAPADPDSGAAPDAPADPDSGAAPDAPADPDAGAAPEAPAAPAAAETRAAHVAPAAPDAGAPTAPAASATRAAQVRRAASAAPASGARRKIHLRPPSPEIQAADPPTPRPTRASAWRGKSESSRGRRVYYDEGVASSDDDSSGDESDDGTSGCLRWFQHRRNRRRRKPQRNLLRNFLVQAFGGCFGRSESPQPKASRSLKVKKVPLAEKRRQMRKEALEKRAQKRAEKKRSKLIDKQLQDEKMGYMCTHRLLLLGAGESGKSTIVKQMRILHVNGFNGEGGEEDPQAARSNSDGEKATKVQDIKNNLKEAIETIVAAMSNLVPPVELANPENQFRVDYILSVMNVPDFDFPPEFYEHAKALWEDEGVRACYERSNEYQLIDCAQYFLDKIDVIKQADYVPSDQDLLRCRVLTSGIFETKFQVDKVNFHMFDVGGQRDERRKWIQCFNDVTAIIFVVASSSYNMVIREDNQTNRLQEALNLFKSIWNNRWLRTISVILFLNKQDLLAEKVLAGKSKIEDYFPEFARYTTPEDATPEPGEDPRVTRAKYFIRDEFLRISTASGDGRHYCYPHFTCAVDTENIRRVFNDCRDIIQRMHLRQYELL

SEQ ID NO: 342 - protein, 327 aa, Homo sapiens
MTAPCPPPPPDPQFVLRGTQSPVHALHFCEGAQAQGRPLLFSGSQSGLVHIWSLQTRRAVTTLDGHGGQCVTWLQTLPQGRQLLSQGRDLKLCLWDLAEGRSAVVDSVCLESVGFCRSSILAGGQPRWTLAVPGRGSDEVQILEMPSKTSVCALKPKADAKLGMPMCLRLWQADCSSRPLLLAGYEDGSVVLWDVSEQKVCSRIACHEEPVMDLDFDSQKARGISGSAGKALAVWSLDWQQALQVRGTHELTNPGIAEVTIRPDRKILATAGWDHRIRVFHWRTMQPLAVLAFHSAAVQCVAFTADGLLAAGSKDQRISLWSLYPRA

SEQ ID NO: 343 - protein, 556 aa, Homo sapiens
MARFGLPALLCTLAVLSAALLAAELKSKSCSEVRRLYVSKGFNKNDAPLHEINGDHLKICPQGSTCCSQEMEEKYSLQSKDDFKSVVSEQCNHLQAVFASRYKKFDEFFKELLENAEKSLNDMFVKTYGHLYMQNSELFKDLFVELKRYYVVGNVNLEEMLNDFWARLLERMFRLVNSQYHFTDEYLECVSKYTEQLKPFGDVPRKLKLQVTRAFVAARTFAQGLAVAGDVVSKVSVVNPTAQCTHALLKMIYCSHCRGLVTVKPCYNYCSNIMRGCLANQGDLDFEWNNFIDAMLMVAERLEGPFNIESVMDPIDVKISDAIMNMQDNSVQVSQKVFQGCGPPKPLPAGRISRSISESAFSARFRPHHPEERPTTAAGTSLDRLVTDVKEKLKQAKKFWSSLPSNVCNDERMAAGNGNEDDCWNGKGKSRYLFAVTGNGLANQGNNPEVQVDTSKPDILILRQIMALRVMTSKMKNAYNGNDVDFFDISDESSGEGSGSGCEYQQCPSEFDYNATDHAGKSANEKADSAGVRPGAQAYLLTVFCILFLVMQREWR

SEQ ID NO: 344 - protein, 555 aa, Homo sapiens
MPSWIGAVILPLLGLLLSLPAGADVKARSCGEVRQAYGAKGFSLADIPYQEIAGEHLRICPQEYTCCTTEMEDKLSQQSKLEFENLVEETSHFVRTTFVSRHKKFDEFFRELLENAEKSLNDMFVRTYGMLYMQNSEVFQDLFTELKRYYTGGNVNLEEMLNDFWARLLERMFQLINPQYHFSEDYLECVSKYTDQLKPFGDVPRKLKIQVTRAFIAARTFVQGLTVGREVANRVSKVSPTPGCIRALMKMLYCPYCRGLPTVRPCNNYCLNVMKGCLANQADLDTEWNLFIDAMLLVAERLEGPFNIESVMDPIDVKISEAIMNMQENSMQVSAKVFQGCGQPKPAPALRSARSAPENFNTRFRPYNPEERPTTAAGTSLDRLVTDIKEKLKLSKKVWSALPYTICKDESVTAGTSNEEECWNGHSKARYLPEIMNDGLTNQINNPEVDVDITRPDTFIRQQIMALRVMTNKLKNAYNGNDVNFQDTSDESSGSGSGSGCMDDVCPTEFEFVTTEAPAVDPDRREVDSSAAQRGHSLLSWSLTCIVLALQRLCR

SEQ ID NO: 345 - protein, 727 aa, Homo sapiens
MAFQKAVKGTILVGGGALATVLGLSQFAHYRRKQMNLAYVKAADCISEPVNREPPSREAQLLTLQNTSEFDILVIGGGATGSGCALDAVTRGLKTALVERDDFSSGTSSRSTKLIHGGVRYLQKAIMKLDIEQYRMVKEALHERANLLEIAPHLSAPLPIMLPVYKWWQLPYYWVGIKLYDLVAGSNCLKSSYVLSKSRALEHFPMLQKDKLVGAIVYYDGQHNDARMNLAIALTAARYGAATANYMEVVSLLKKTDPQTGKVRVSGARCKDVLTGQEFDVRAKCVINATGPFTDSVRKMDDKDAAAICQPSAGVHIVMPGYYSPESMGLLDPATSDGRVIFFLPWQKMTIAGTTDTPTDVTHHPIPSEEDINFILNEVRNYLSCDVEVRRGDVLAAWSGIRPLVTDPKSADTQSISRNHVVDISESGLITIAGGKWTTYRSMAEDTINAAVKTHNLKAGPSRTVGLFLQGGKDWSPTLYIRLVQDYGLESEVAQHLAATYGDKAFEVAKMASVTGKRWPIVGVRLVSEFPYIEAEVKYGIKEYACTAVDMISRRTRLAFLNVQAAEEALPRIVELMGRELNWDDYKKQEQLETARKFLYYEMGYKSRSEQLTDRSEISLLPSDIDRYKKRFHKFDADQKGFITIVDVQRVLESINVQMDENTLHEILNEVDLNKNGQVELNEFLQLMSAIQKGRVSGSRLAILMKTAEENLDRRVPIPVDRSCGGL

SEQ ID NO: 346 - protein, 769 aa, Homo sapiens
MATEGMILTNHDHQIRVGVLTVSDSCFRNLAEDRSGINLKDLVQDPSLLGGTISAYKIVPDEIEEIKETLIDWCDEKELNLILTTGGTGFAPRDVTPEATKEVIEREAPGMALAMLMGSLNVTPLGMLSRPVCGIRGKTLIINLPGSKKGSQECFQFILPALPHAIDLLRDAIVKVKEVHDELEDLPSPPPPLSPPPTTSPHKQTEDKGVQCEEEEEEKKDSGVASTEDSSSSHITAAAIAAKKHPFYTSPAVVMAHGEQPIPGLINYSHHSTDERIPDSIISRGVQVLPRDTASLSTTPSESPRAQATSRLSTASCPTPKVQSRCSSKENILRASHSAVDITKVARRHRMSPFPLTSMDKAFITVLEMTPVLGTEIINYRDGMGRVLAQDVYAKDNLPPFPASVKDGYAVRAADGPGDRFIIGESQAGEQPTQTVMPGQVMRVTTGAPIPCGADAVVQVEDTELIRESDDGTEELEVRILVQARPGQDIRPIGHDIKRGECVLAKGTHMGPSEIGLLATVGVTEVEVNKFPVVAVMSTGNELLNPEDDLLPGKIRDSNRSTLLATIQEHGYPTINLGIVGDNPDDLLNALNEGISRADVIITSGGVSMGEKDYLKQVLDIDLHAQIHFGRVFMKPGLPTTFATLDIDGVRKIIFALPGNPVSAVVTCNLFVVPALRKMQGILDPRPTIIKARLSCDVKLDPRPEYHRCILTWHHQEPLPWAQSTGNQMSSRLMSMRSANGLLMLPPKTEQYVELHKGEVVDVMVIGRL

SEQ ID NO: 347 - protein, 353 aa, Homo sapiens
MEHTHAHLAANSSLSWWSPGSACGLGFVPVVYYSLLLCLGLPANILTVIILSQLVARRQKSSYNYLLALAAADILVLFFIVFVDFLLEDFILNMQMPQVPDKIIEVLEFSSIHTSIWITVPLTIDRYIAVCHPLKYHTVSYPARTRKVIVSVYITCFLTSIPYYWWPNIWTEDYISTSVHHVLIWIHCFTVYLVPCSIFFILNSIIVYKLRRKSNFRLRGYSTGKTTAILFTITSIFATLWAPRIIMILYHLYGAPIQNRWLVHIMSDIANMLALLNTAINFFLYCFISKRFRTMAAATLKAFFKCQKQPVQFYTNHNFSITSSPWISPANSHCIKMLVYQYDKNGKPIKVSP

SEQ ID NO: 348 - protein, 613 aa, Homo sapiens
MRAPGALLARMSRLLLLLLLKVSASSALGVAPASRNETCLGESCAPTVIQRRGRDAWGPGNSARDVLRARAPREEQGAAFLAGPSWDLPAAPGRDPAAGRGAEASAAGPPGPPTRPPGPWRWKGARGQEPSETLGRGNPTALQLFLQISEEEEKGPRGAGISGRSQEQSVKTVPGASDLFYWPRRAGKLQGSHHKPLSKTANGLAGHEGWTIALPGRALAQNGSLGEGIHEPGGPRRGNSTNRRVRLKNPFYPLTQESYGAYAVMCLSVVIFGTGIIGNLAVMCIVCHNYYMRSISNSLLANLAFWDFLIIFFCLPLVIFHELTKKWLLEDFSCKIVPYIEVASLGVTTFTLCALCIDRFRAATNVQMYYEMIENCSSTTAKLAVIWVGALLLALPEVVLRQLSKEDLGFSGRAPAERCIIKISPDLPDTIYVLALTYDSARLWWYFGCYFCLPTLFTITCSLVTARKIRKAEKACTRGNKRQIQLESQMNCTVVALTILYGFCIIPENICNIVTAYMATGVSQQTMDLLNIISQFLLFFKSCVTPVLLFCLCKPFSRAFMECCCCCCEECIQKSSTVTSDDNDNEYTTELELSPFSTIRREMSTFASVGTHC

SEQ ID NO: 349 - protein, 370 aa, Homo sapiens
MANYSHAADNILQNLSPLTAFLKLTSLGFIIGVSVVGNLLISILLVKDKTLHRAPYYFLLDLCCSDILRSAICFPFVFNSVKNGSTWTYGTLTCKVIAFLGVLSCFHTAFMLFCISVTRYLAIAHHRFYTKRLTFWTCLAVICMVWTLSVAMAFPPVLDVGTYSFIREEDQCTFQHRSFRANDSLGFMLLLALILLATQLVYLKLIFFVHDRRKMKPVQFVAAVSQNWTFHGPGASGQAAANWLAGFGRGPTPPTLLGIRQNANTTGRRRLLVLDEFKMEKRISRMFYIMTFLFLTLWGPYLVACYWRVFARGPVVPGGFLTAAVWMSFAQAGINPFVCIFSNRELRRCFSTTLLYCRKSRLPREPYCVI

SEQ ID NO: 350 - protein, 203 aa, Homo sapiens
  MOD_RES (49)..(49): Selenocysteine
MCAARLAAAAAAAQSVYAFSARPLAGGEPVSLGSLRGKVLLIENVASLXGTTVRDYTQMNELQRRLGPRGLVVLGFPCNQFGHQENAKNEEILNSLKYVRPGGGFEPNFMLFEKCEVNGAGAHPLFAFLREALPAPSDDATALMTDPKLITWSPVCRNDVAWNFEKFLVGPDGVPLRRYSRRFQTIDIEPDIEALLSQGPSCA

SEQ ID NO: 351 - protein, 1009 aa, Homo sapiens
MEALTLWLLPWICQCVSVRADSIIHIGAIFEENAAKDDRVFQLAVSDLSLNDDILQSEKITYSIKVIEANNPFQAVQEACDLMTQGILALVTSTGCASANALQSLTDAMHIPHLFVQRNPGGSPRTACHLNPSPDGEAYTLASRPPVRLNDVMLRLVTELRWQKFVMFYDSEYDIRGLQSFLDQASRLGLDVSLQKVDKNISHVFTSLFTTMKTEELNRYRDTLRRAILLLSPQGAHSFINEAVETNLASKDSHWVFVNEEISDPEILDLVHSALGRMTVVRQIFPSAKDNQKCTRNNHRISSLLCDPQEGYLQMLQISNLYLYDSVLMLANAFHRKLEDRKWHSMASLNCIRKSTKPWNGGRSMLDTIKKGHITGLTGVMEFREDSSNPYVQFEILGTTYSETFGKDMRKLATWDSEKGLNGSLQERPMGSRLQGLTLKVVTVLEEPFVMVAENILGQPKRYKGFSIDVLDALAKALGFKYEIYQAPDGRYGHQLHNTSWNGMIGELISKRADLAISAITITPERESVVDFSKRYMDYSVGILIKKPEEKISIFSLFAPFDFAVWACIAAAIPVVGVLIFVLNRIQAVRAQSAAQPRPSASATLHSAIWIVYGAFVQQGGESSVNSMAMRIVMGSWWLFTLIVCSSYTANLAAFLTVSRMDNPIRTFQDLSKQVEMSYGTVRDSAVYEYFRAKGTNPLEQDSTFAELWRTISKNGGADNCVSSPSEGIRKAKKGNYAFLWDVAVVEYAALTDDDCSVTVIGNSISSKGYGIALQHGSPYRDLFSQRILELQDTGDLDVLKQKWWPHMGRCDLTSHASAQADGKSLKLHSFAGVFCILAIGLLLACLVAALELWWNSNRCHQETPKEDKEVNLEQVHRRMNSLMDEDIAHKQISPASIELSALEMGGLAPTQTLEPTREYQNTQLSVSTFLPEQSSHGTSRTLSSGPSSNLPLPLSSSATMPSMQCKHRSPNGGLFRQSPVKTPIPMSFQPVPGGVLPEALDTSHGTSI

SEQ ID NO: 352 - protein, 1007 aa, Homo sapiens
MEVFPFLLVLSVWWSRTWDSANADSIIHIGAIFDESAKKDDEVFRTAVGDLNQNEEILQTEKITFSVTFVDGNNPFQAVQEACELMNQGILALVSSIGCTSAGSLQSLADAMHIPHLFIQRSTAGTPRSGCGLTRSNRNDDYTLSVRPPVYLHDVILRVVTEYAWQKFIIFYDSEYDIRGIQEFLDKVSQQGMDVALQKVENNINKMITTLFDTMRIEELNRYRDTLRRAILVMNPATAKSFITEVVETNLVAFDCHWIIINEEINDVDVQELVRRSIGRLTIIRQTFPVPQNISQRCFRGNHRISSTLCDPKDPFAQNMEISNLYIYDTVLLLANAFHKKLEDRKWHSMASLSCIRKNSKPWQGGRSMLETIKKGGVSGLTGELEFGENGGNPNVHFEILGTNYGEELGRGVRKLGCWNPVTGLNGSLTDKKLENNMRGVVLRVVTVLEEPFVMVSENVLGKPKKYQGFSIDVLDALSNYLGFNYEIYVAPDHKYGSPQEDGTWNGLVGELVFKRADIGISALTITPDRENVVDFTTRYMDYSVGVLLRRAEKTVDMFACLAPFDLSLWACIAGTVLLVGLLVYLLNWLNPPRLQMGSMTSTTLYNSMWFVYGSFVQQGGEVPYTTLATRMMMGAWWLFALIVISSYTANLAAFLTITRIESSIQSLQDLSKQTEIPYGTVLDSAVYEHVRMKGLNPFERDSMYSQMWRMINRSNGSENNVLESQAGIQKVKYGNYAFVWDAAVLEYVAINDPDCSFYTIGNTVADRGYGIALQHGSPYRDVFSQRILELQQNGDMDILKHKWWPKNGQCDLYSSVDTKQKGGALDIKSFAGVFCILAAGIVLSCFIAMLETWWNKRKGSRVPSKEDDKEIDLEHLHRRVNSLCTDDDSPHKQFSTSSIDLTPLDIDTLPTRQALEQISDFRNTHITTTTFIPEQIQTLSRTLSAKAASGFTFGNVPEHRTGPFRHRAPNGGFFRSPIKTMSSIPYQPTPTLGLNLGNDPDRGTSI

SEQ ID NO: 353 - protein, 1211 aa, Homo sapiens
MATTATPATNQGWPEDFGFRLGGSGPCFVLEVAKGSSAHAGGLRPGDQILEVEGLAVGGLSRERLVRLARRCPRVPPSLGVLPAPDGGPGPGSGPAAPTTVLRAPRCGRGLALGRELLRLAGRKRPDAVHRERRRKAQEFSRKVDEILGDQPTAKEQVFAALKQFAAEQRVDDLVWTLTLALPREACGPLLDNLRIFIPKKHRARFDEVVSQGLLGKLCRARRAQGAQRLRRSRSEERPERLLVSTRASAPPRRPDEPPPRRASLLVGGLAGPGGARRTVRVYKGNKSFGFTLRGHGPVWIESVLPGSPADNAALKSGDRILFLNGLDMRNCSHDKVVSMLQGSGAMPTLVVEEGLVPFASDSDSLDSPNPSSALTSLQWVAEILPSSIRVQGRTFSQQLEHLLTPPERYGVCRALESFFQHRNIDTLIVDVYPVLDTPAKQVLWQFIYQLLTYEEQELCQEKIACFLGYTAMTAEPEPELDLESEPTPEPQPRSSLRASSMCRRSLRSQGLEAGLSCGPSECPEMPLPLIPGERQAGDGTSLPETPNPKMMSAVYAELESRLNSSFKGKMGTVSKSRASPPGPSPAVTTGPRTLSGVSWPSERLLPSPCYHPLCSGGLASPSSSESHPYASLDSSRAPSPQPGPGPICPDSPPSPDPTRPPSRRKLFTFSHPVRSRDTDRFLDVLSEQLGPRVTIVDDFLTPENDYEEMSFHDDQGSFVTNERSSASDCISSSEEGSSLTYSSISDHIPPPPLSPPPPPPLPFHDAKPSSRSSDGSRGPAQALAKPLTQLSHPVPPPPPPPLPPPVPCAPPMLSRGLGHRRSETSHMSVKRLRWEQVENSEGTIWGQLGEDSDYDKLSDMVKYLDLELHFGTQKPAKPVPGPEPFRKKEVVEILSHKKAYNTSILLAHLKLSPAELRQVLMSMEPRRLEPAHLAQLLLFAPDADEEQRYQAFREAPGRLSEPDQFVLQMLSVPEYKTRLRSLHFQATLQEKTEEIRGSLECLRQASLELKNSRKLAKILEFVLAMGNYLNDGQPKTNKTTGFKINFLTELNSTKTVDGKSTFLHILAKSLSQHFPELLGFAQDLPTVPLAAKVNQRALTSDLADLHGTISEIQDACQSISPSSEDKFAMVMSSFLETAQPALRALDGLQREAMEELGKALAFFGEDSKATTSEAFFGIFAEFMSKFERALSDLQAGEGLRSSGMVSPLAW

SEQ ID NO: 354 - protein, 908 aa, Homo sapiens
MKIIFPILSNPVFRRTVKLLLCLLWIGYSQGTTHVLRFGGIFEYVESGPMGAEELAFRFAVNTINRNRTLLPNTTLTYDTQKINLYDSFEASKKACDQLSLGVAAIFGPSHSSSANAVQSICNALGVPHIQTRWKHQVSDNKDSFYVSLYPDFSSLSRAILDLVQFFKWKTVTVVYDDSTGLIRLQELIKAPSRYNLRLKIRQLPADTKDAKPLLKEMKRGKEFHVIFDCSHEMAAGILKQALAMGMMTEYYHYIFTTLDLFALDVEPYRYSGVNMTGFRILNTENTQVSSIIEKWSMERLQAPPKPDSGLLDGFMTTDAALMYDAVHVVSVAVQQFPQMTVSSLQCNRHKPWRFGTRFMSLIKEAHWEGLTGRITFNKTNGLRTDFDLDVISLKEEGLEKIGTWDPASGLNMTESQKGKPANITDSLSNRSLIVTTILEEPYVLFKKSDKPLYGNDRFEGYCIDLLRELSTILGFTYEIRLVEDGKYGAQDDANGQWNGMVRELIDHKADLAVAPLAITYVREKVIDFSKPFMTLGISILYRKPNGTNPGVFSFLNPLSPDIWMYILLAYLGVSCVLFVIARFSPYEWYNPHPCNPDSDVVENNFTLLNSFWFGVGALMQQGSELMPKALSTRIVGGIWWFFTLIIISSYTANLAAFLTVERMESPIDSADDLAKQTKIEYGAVEDGATMTFFKKSKISTYDKMWAFMSSRRQSVLVKSNEEGIQRVLTSDYAFLMESTTIEFVTQRNCNLTQIGGLIDSKGYGVGTPMGSPYRDKITIAILQLQEEGKLHMMKEKWWRGNGCPEEESKEASALGVQNIGGIFIVLAAGLVLSVFVAVGEFLYKSKKNAQLEKRSFCSAMVEELRMSLKCQRRLKHKPQAPVIVKTEEVINMHTFNDRRLPGKETMA

SEQ ID NO: 355 - protein, 919 aa, Homo sapiens [sequence omitted]

SEQ ID NO: 356 - protein, 956 aa, Homo sapiens
MPRVSAPLVLLPAWLVMVACSPHSLRIAAILDDPMECSRGERLSITLAKNRINRAPERLGKAKVEVDIFELLRDSEYETAETMCQILPKGVVAVLGPSSSPASSSIISNICGEKEVPHFKVAPEEFVKFQFQRFTTLNLHPSNTDISVAVAGILNFFNCTTACLICAKAECLLNLEKLLRQFLISKDTLSVRMLDDTRDPTPLLKEIRDDKTATIIIHANASMSHTILLKAAELGMVSAYYTYIFTNLEFSLQRMDSLVDDRVNILGFSIFNQSHAFFQEFAQSLNQSWQENCDHVPFTGPALSSALLFDAVYAVVTAVQELNRSQEIGVKPLSCGSAQIWQHGTSLMNYLRMVELEGLTGHIEFNSKGQRSNYALKILQFTRNGFRQIGQWHVAEGLSMDSHLYASNISDTLFNTTLVVTTILENPYLMLKGNHQEMEGNDRYEGFCVDMLKELAEILRFNYKIRLVGDGVYGVPEANGTWTGMVGELIARKADLAVAGLTITAEREKVIDFSKPFMTLGISILYRVHMGRKPGYFSFLDPFSPGVWLFMLLAYLAVSCVLFLVARLTPYEWYSPHPCAQGRCNLLVNQYSLGNSLWFPVGGFMQQGSTIAPRALSTRCVSGVWWAFTLIIISSYTANLAAFLTVQRMDVPIESVDDLADQTAIEYGTIHGGSSMTFFQNSRYQTYQRMWNYMYSKQPSVFVKSTEEGIARVLNSNYAFLLESTMNEYYRQRNCNLTQIGGLLDTKGYGIGMPVGSVFRDEFDLAILQLQENNRLEILKRKWWEGGKCPKEEDHRAKGLGMENIGGIFVVLICGLIVAIFMAMLEFLWTLRHSEATEVSVCQEMVTELRSIILCQDSIHPRRRRAAVPPPRPPIPEERRPRGTATLSNGKLCGAGEPDQLAQRLAQEAALVARGCTHIRVCPECRRFQGLRARPSPARSEESLEWEKTTNSSEPE

SEQ ID NO: 357 - protein, 980 aa, Homo sapiens
MPAELLLLLIVAFASPSCQVLSSLRMAAILDDQTVCGRGERLALALAREQINGIIEVPAKARVEVDIFELQRDSQYETTDTMCQILPKGVVSVLGPSSSPASASTVSHICGEKEIPHIKVGPEETPRLQYLRFASVSLYPSNEDVSLAVSRILKSFNYPSASLICAKAECLLRLEELVRGFLISKETLSVRMLDDSRDPTPLLKEIRDDKVSTIIIDANASISHLILRKASELGMTSAFYKYILTTMDFPILHLDGIVEDSSNILGFSMFNTSHPFYPEFVRSLNMSWRENCEASTYLGPALSAALMFDAVHVVVSAVRELNRSQEIGVKPLACTSANIWPHGTSLMNYLRMVEYDGLTGRVEFNSKGQRTNYTLRILEKSRQGHREIGVWYSNRTLAMNATTLDINLSQTLANKTLVVTTILENPYVMRRPNFQALSGNERFEGFCVDMLRELAELLRFRYRLRLVEDGLYGAPEPNGSWTGMVGELINRKADLAVAAFTITAEREKVIDFSKPFMTLGISILYRVHMGRKPGYFSFLDPFSPAVWLFMLLAYLAVSCVLFLAARLSPYEWYNPHPCLRARPHILENQYTLGNSLWFPVGGFMQQGSEIMPRALSTRCVSGVWWAFTLIIISSYTANLAAFLTVQRMEVPVESADDLADQTNIEYGTIHAGSTMTFFQNSRYQTYQRMWNYMQSKQPSVFVKSTEEGIARVLNSRYAFLLESTMNEYHRRLNCNLTQIGGLLDTKGYGIGMPLGSPFRDEITLAILQLQENNRLEILKRKWWEGGRCPKEEDHRAKGLGMENIGGIFIVLICGLIIAVFVAVMEFIWSTRRSAESEEVSVCQEMLQELRHAVSCRKTSRSRRRRRPGGPSRALLSLRAVREMRLSNGKLYSAGAGGDAGSAHGGPQRLLDDPGPPSGARPAAPTPCTHVRVCQECRRIQALRASGAGAPPRGLGVPAEATSPPRPRPGPAGPRELAEHE

SEQ ID NO: 358 - protein, 943 aa, Homo sapiens
MSTMRLLTLALLFSCSVARAACDPKIVNIGAVLSTRKHEQMFREAVNQANKRHGSWKIQLNATSVTHKPNAIQMALSVCEDLISSQVYAILVSHPPTPNDHFTPTPVSYTAGFYRIPVLGLTTRMSIYSDKSIHLSFLRTVPPYSHQSSVWFEMMRVYSWNHIILLVSDDHEGRAAQKRLETLLEERESKSKKRNYENLDQLSYDNKRGPKAEKVLQFDPGTKNVTALLMEAKELEARVIILSASEDDAATVYRAAAMLNMTGSGYVWLVGEREISGNALRYAPDGILGLQLINGKNESAHISDAVGVVAQAVHELLEKENITDPPRGCVGNTNIWKTGPLFKRVLMSSKYADGVTGRVEFNEDGDRKFANYSIMNLQNRKLVQVGIYNGTHVIPNDRKIIWPGGETEKPRGYQMSTRLKIVTIHQEPFVYVKPTLSDGTCKEEFTVNGDPVKKVICTGPNDTSPGSPRHTVPQCCYGFCIDLLIKLARTMNFTYEVHLVADGKFGTQERVNNSNKKEWNGMMGELLSGQADMIVAPLTINNERAQYIEFSKPFKYQGLTILVKKEIPRSTLDSFMQPFQSTLWLLVGLSVHVVAVMLYLLDRFSPFGRFKVNSEEEEEDALTLSSAMWFSWGVLLNSGIGEGAPRSFSARILGMVWAGFAMIIVASYTANLAAFLVLDRPEERITGINDPRLRNPSDKFIYATVKQSSVDIYFRRQVELSTMYRHMEKHNYESAAEAIQAVRDNKLHAFIWDSAVLEFEASQKCDLVTTGELFFRSGFGIGMRKDSPWKQNVSLSILKSHENGFMEDLDKTWVRYQECDSRSNAPATLTFENMAGVFMLVAGGIVAGIFLIFIEIAYKRHKDARRKQMQLAFAAVNVWRKNLQDRKSGRAEPDPKKKATFRAITSTLASSFKRRRSSKDTQYHPTDITGPLNLSDPSVSTVV

SEQ ID NO: 359 - protein, 1464 aa, Homo sapiens [sequence omitted]

SEQ ID NO: 360 - protein, 1484 aa, Homo sapiens [sequence omitted]

SEQ ID NO: 361 - protein, 1076 aa, Homo sapiens
MIAVSFKCRCQILRRLTKDESPYTKSASQTKPPDGALAVRRQSIPEEFKGSTVVELMKKEGTTLGLTVSGGIDKDGKPRVSNLRQGGIAARSDQLDVGDYIKAVNGINLAKFRHDEIISLLKNVGERVVLEVEYELPPVSVQGSSVIFRTVEVTLHKEGNTFGFVIRGGAHDDRNKSRPVVITCVRPGGPADREGTIKPGDRLLSVDGIRLLGTTHAEAMSILKQCGQEAALLIEYDVSVMDSVATASGPLLVEVAKTPGASLGVALTTSMCCNKQVIVIDKIKSASIADRCGALHVGDHILSIDGTSMEYCTLAEATQFLANTTDQVKLEILPHHQTRLALKGPDHAALVSSSFSPTSMSAYSLSSLNMGTLPRSLYSTSPRGTMMRRRLKKKDFKSSLSLASSTVGLAGQVVHTETTEVVLTADPVTGFGIQLQGSVFATETLSSPPLISYIEADSPAERCGVLQIGDRVMAINGIPTEDSTFEEASQLLRDSSITSKVTLEIEFDVAESVIPSSGTFHVKLPKKHNVELGITISSPSSRKPGDPLVISDIKKGSVAHRTGTLELGDKLLAIDNIRLDNCSMEDAVQILQQCEDLVKLKIRKDEDNSDEQESSGAIIYTVELKRYGGPLGITISGTEEPFDPIIISSLTKGGLAERTGAIHIGDRILAINSSSLKGKPLSEAIHLLQMAGETVTLKIKKQTDAQSASSPKKFPISSHLSDLGDVEEDSSPAQKPGKLSDMYPSTVPSVDSAVDSWDGSAIDTSYGTQGTSFQASGYNFNTYDWRSPKQRGSLSPVTKPRSQTYPDVGLSYEDWDRSTASGFAGAADSAETEQEENFWSQALEDLETCGQSGILRELEEKADRRVSLRNMTLLATIMSGSTMSLNHEAPTPRSQLGRQASFQERSSSRPHYSQTTRSNTLPSDVGRKSVTLRKMKQEIKEIMSPTPVELHKVTLYKDSDMEDFGFSVADGLLEKGVYVKNIRPAGPGDLGGLKPYDRLLQVNHVRTRDFDCCLVVPLIAESGNKLDLVISRNPLASQKSIDQQSLPGDWSEQNSAFFQQPSHGGNLETREPTNTL

SEQ ID NO: 362 - protein, 1194 aa, Homo sapiens
MVGLLLFFFPAIFLEVSLLPRSPGRKVLLAGASSQRSVARMDGDVIIGALFSVHHQPPAEKVPERKCGEIREQYGIQRVEAMFHTLDKINADPVLLPNITLGSEIRDSCWHSSVALEQSIEFIRDSLISIRDEKDGINRCLPDGQSLPPGRTKKPIAGVIGPGSSSVAIQVQNLLQLFDIPQIAYSATSIDLSDKTLYKYFLRVVPSDTLQARAMLDIVKRYNWTYVSAVHTEGNYGESGMDAFKELAAQEGLCIAHSDKIYSNAGEKSFDRLLRKLRERLPKARVVVCFCEGMTVRGLLSAMRRLGVVGEFSLIGSDGWADRDEVIEGYEVEANGGITIKLQSPEVRSFDDYFLKLRLDTNTRNPWFPEFWQHRFQCRLPGHLLENPNFKRICTGNESLEENYVQDSKMGFVINAIYAMAHGLQNMHHALCPGHVGLCDAMKPIDGSKLLDFLIKSSFIGVSGEEVWFDEKGDAPGRYDIMNLQYTEANRYDYVHVGTWHEGVLNIDDYKIQMNKSGVVRSVCSEPCLKGQIKVIRKGEVSCCWICTACKENEYVQDEFTCKACDLGWWPNADLTGCEPIPVRYLEWSNIESIIAIAFSCLGILVTLFVTLIFVLYRDTPVVKSSSRELCYIILAGIFLGYVCPFTLIAKPTTTSCYLQRLLVGLSSAMCYSALVTKTNRIARILAGSKKKICTRKPRFMSAWAQVIIASILISVQLTLVVTLIIMEPPMPILSYPSIKEVYLICNTSNLGVVAPLGYNGLLIMSCTYYAFKTRNVPANFNEAKYIAFTMYTTCIIWLAFVPIYFGSNYKIITTCFAVSLSVTVALGCMFTPKMYIIIAKPERNVRSAFTTSDVVRMHVGDGKLPCRSNTFLNIFRRKKAGAGNANSNGKSVSWSEPGGGQVPKGQHMWHRLSVHVKTNETACNQTAVIKPLTKSYQGSGKSLTFSDTSTKTLYNVEEEEDAQPIRFSPPGSPSMVVHRRVPSAATTPPLPSHLTAEETPLFLAEPALPKGLPPPLQQQQQPPPQQKSLMDQLQGVVSNFSTAIPDFHAVLAGPGGPGNGLRSLYPPPPPPQHLQMLPLQLSTFGEELVSPPADDDDDSERFKLLQEYVYEHEREGNTEEDELEEEEEDLQAASKLTPDDSPALTPPSPFRDSVASGSSVPSSPVSESVLCTPPNVSYASVILRDYKQSSSTL

SEQ ID NO: 363 - protein, 912 aa, Homo sapiens
MPGKRGLGWWWARLPLCLLLSLYGPWMPSSLGKPKGHPHMNSIRIDGDITLGGLFPVHGRGSEGKPCGELKKEKGIHRLEAMLFALDRINNDPDLLPNITLGARILDTCSRDTHALEQSLTFVQALIEKDGTEVRCGSGGPPIITKPERVVGVIGASGSSVSIMVANILRLFKIPQISYASTAPDLSDNSRYDFFSRVVPSDTYQAQAMVDIVRALKWNYVSTVASEGSYGESGVEAFIQKSREDGGVCIAQSVKIPREPKAGEFDKIIRRLLETSNARAVIIFANEDDIRRVLEAARRANQTGHFFWMGSDSWGSKIAPVLHLEEVAEGAVTILPKRMSVRGFDRYFSSRTLDNNRRNIWFAEFWEDNFHCKLSRHALKKGSHVKKCTNRERIGQDSAYEQEGKVQFVIDAVYAMGHALHAMHRDLCPGRVGLCPRMDPVDGTQLLKYIRNVNFSGIAGNPVTFNENGDAPGRYDIYQYQLRNDSAEYKVIGSWTDHLHLRIERMHWPGSGQQLPRSICSLPCQPGERKKTVKGMPCCWHCEPCTGYQYQVDRYTCKTCPYDMRPTENRTGCRPIPIIKLEWGSPWAVLPLFLAVVGIAATLFVVITFVRYNDTPIVKASGRELSYVLLAGIFLCYATTFLMIAEPDLGTCSLRRIFLGLGMSISYAALLTKTNRIYRIFEQGKRSVSAPRFISPASQLAITFSLISLQLLGICVWFVVDPSHSVVDFQDQRTLDPRFARGVLKCDISDLSLICLLGYSMLLMVTCTVYAIKTRGVPETFNEAKPIGFTMYTTCIVWLAFIPIFFGTSQSADKLYIQTTTLTVSVSLSASVSLGMLYMPKVYIILFHPEQNVPKRKRSLKAVVTAATMSNKFTQKGNFRPNGEAKSELCENLEAPALATKQTYVTYTNHAI

SEQ ID NO: 364 - protein, 1212 aa, Homo sapiens
MVLLLILSVLLLKEDVRGSAQSSERRVVAHMPGDIIIGALFSVHHQPTVDKVHERKCGAVREQYGIQRVEAMLHTLERINSDPTLLPNITLGCEIRDSCWHSAVALEQSIEFIRDSLISSEEEEGLVRCVDGSSSSFRSKKPIVGVIGPGSSSVAIQVQNLLQLFNIPQIAYSATSMDLSDKTLFKYFMRVVPSDAQQARAMVDIVKRYNWTYVSAVHTEGNYGESGMEAFKDMSAKEGICIAHSYKIYSNAGEQSFDKLLKKLTSHLPKARVVACFCEGMTVRGLLMAMRRLGLAGEFLLLGSDGWADRYDVTDGYQREAVGGITIKLQSPDVKWFDDYYLKLRPETNHRNPWFQEFWQHRFQCRLEGFPQENSKYNKTCNSSLTLKTHHVQDSKMGFVINAIYSMAYGLHNMQMSLCPGYAGLCDAMKPIDGRKLLESLMKTNFTGVSGDTILFDENGDSPGRYEIMNFKEMGKDYFDYINVGSWDNGELKMDDDEVWSKKSNIIRSVCSEPCEKGQIKVIRKGEVSCCWTCTPCKENEYVFDEYTCKACQLGSWPTDDLTGCDLIPVQYLRWGDPEPIAAVVFACLGLLATLFVTVVFIIYRDTPVVKSSSRELCYIILAGICLGYLCTFCLIAKPKQIYCYLQRIGIGLSPAMSYSALVTKTNRIARILAGSKKKICTKKPRFMSACAQLVIAFILICIQLGIIVALFIMEPPDIMHDYPSIREVYLICNTTNLGVVTPLGYNGLLILSCTFYAFKTRNVPANFNEAKYIAFTMYTTCIIWLAFVPIYFGSNYKIITMCFSVSLSATVALGCMFVPKVYIILAKPERNVRSAFTTSTVVRMHVGDGKSSSAASRSSSLVNLWKRRGSSGETLRYKDRRLAQHKSEIECFTPKGSMGNGGRATMSSSNGKSVTWAQNEKSSRGQHLWQRLSIHINKKENPNQTAVIKPFPKSTESRGLGAGAGAGGSAGGVGATGGAGCAGAGPGGPESPDAGPKALYDVAEAEEHFPAPARPRSPSPISTLSHRAGSASRTDDDVPSLHSEPVARSSSSQGSLMEQISSVVTRFTANISELNSMMLSTAAPSPGVGAPLCSSYLIPKEIQLPTTMTTFAEIQPLPAIEVTGGAQPAAGAQAAGDAARESPAAGPEAAAAKPDLEELVALTPPSPFRDSVDSGSTTPNSPVSESALCIPSSPKYDTLIIRDYTQSSSSL

SEQ ID NO: 365 - protein, 922 aa, Homo sapiens
MVQLRKLLRVLTLMKFPCCVLEVLLCALAAAARGQEMYAPHSIRIEGDVTLGGLFPVHAKGPSGVPCGDIKRENGIHRLEAMLYALDQINSDPNLLPNVTLGARILDTCSRDTYALEQSLTFVQALIQKDTSDVRCTNGEPPVFVKPEKVVGVIGASGSSVSIMVANILRLFQIPQISYASTAPELSDDRRYDFFSRVVPPDSFQAQAMVDIVKALGWNYVSTLASEGSYGEKGVESFTQISKEAGGLCIAQSVRIPQERKDRTIDFDRIIKQLLDTPNSRAVVIFANDEDIKQILAAAKRADQVGHFLWVGSDSWGSKINPLHQHEDIAEGAITIQPKRATVEGFDAYFTSRTLENNRRNVWFAEYWEENFNCKLTISGSKKEDTDRKCTGQERIGKDSNYEQEGKVQFVIDAVYAMAHALHHMNKDLCADYRGVCPEMEQAGGKKLLKYIRNVNFNGSAGTPVMFNKNGDAPGRYDIFQYQTTNTSNPGYRLIGQWTDELQLNIEDMQWGKGVREIPASVCTLPCKPGQRKKTQKGTPCCWTCEPCDGYQYQFDEMTCQHCPYDQRPNENRTGCQDIPIIKLEWHSPWAVIPVFLAMLGIIATIFVMATFIRYNDTPIVRASGRELSYVLLTGIFLCYIITFLMIAKPDVAVCSFRRVFLGLGMCISYAALLTKTNRIYRIFEQGKKSVTAPRLISPTSQLAITSSLISVQLLGVFIWFGVDPPNIIIDYDEHKTMNPEQARGVLKCDITDLQIICSLGYSILLMVTCTVYAIKTRGVPENFNEAKPIGFTMYTTCIVWLAFIPIFFGTAQSAEKLYIQTTTLTISMNLSASVALGMLYMPKVYIIIFHPELNVQKRKRSFKAVVTAATMSSRLSHKPSDRPNGEAKTELCENVDPNNCIPPVRKSVQKSVTWYTIPPTV

SEQ ID NO: 366 - protein, 908 aa, Homo sapiens
MVCEGKRSASCPCFFLLTAKFYWILTMMQRTHSQEYAHSIRVDGDIILGGLFPVHAKGERGVPCGELKKEKGIHRLEAMLYAIDQINKDPDLLSNITLGVRILDTCSRDTYALEQSLTFVQALIEKDASDVKCANGDPPIFTKPDKISGVIGAAASSVSIMVANILRLFKIPQISYASTAPELSDNTRYDFFSRVVPPDSYQAQAMVDIVTALGWNYVSTLASEGNYGESGVEAFTQISREIGGVCIAQSQKIPREPRPGEFEKIIKRLLETPNARAVIMFANEDDIRRILEAAKKLNQSGHFLWIGSDSWGSKIAPVYQQEEIAEGAVTILPKRASIDGFDRYFRSRTLANNRRNVWFAEFWEENFGCKLGSHGKRNSHIKKCTGLERIARDSSYEQEGKVQFVIDAVYSMAYALHNMHKDLCPGYIGLCPRMSTIDGKELLGYIRAVNFNGSAGTPVTFNENGDAPGRYDIFQYQITNKSTEYKVIGHWTNQLHLKVEDMQWAHREHTHPASVCSLPCKPGERKKTVKGVPCCWHCERCEGYNYQVDELSCELCPLDQRPNMNRTGCQLIPIIKLEWHSPWAVVPVFVAILGIIATTFVIVTFVRYNDTPIVRASGRELSYVLLTGIFLCYSITFLMIAAPDTIICSFRRVFLGLGMCFSYAALLTKTNRIHRIFEQGKKSVTAPKFISPASQLVITFSLISVQLLGVFVWFVVDPPHIIIDYGEQRTLDPEKARGVLKCDISDLSLICSLGYSILLMVTCTVYAIKTRGVPETFNEAKPIGFTMYTTCIIWLAFIPIFFGTAQSAEKMYIQTTTLTVSMSLSASVSLGMLYMPKVYIIIFHPEQNVQKRKRSFKAVVTAATMQSKLIQKGNDRPNGEVKSELCESLETNTSSTKTTYISYSNHSI

SEQ ID NO: 367 - protein, 384 aa, Homo sapiens
MALNDCFLLNLEVDHFMHCNISSHSADLPVNDDWSHPGILYVIPAVYGVIILIGLIGNITLIKIFCTVKSMRNVPNLFISSLALGDLLLLITCAPVDASRYLADRWLFGRIGCKLIPFIQLTSVGVSVFTLTALSADRYKAIVRPMDIQASHALMKICLKAAFIWIISMLLAIPEAVFSDLHPFHEESTNQTFISCAPYPHSNELHPKIHSMASFLVFYVIPLSIISVYYYFIAKNLIQSAYNLPVEGNIHVKKQIESRKRLAKTVLVFVGLFAFCWLPNHVIYLYRSYHYSEVDTSMLHFVTSICARLLAFTNSCVNPFALYLLSKSFRKQFNTQLLCCQPGLIIRSHSTGRSTTCMTSLKSTNPSVATFSLINGNICHERYV

SEQ ID NO: 368 - protein, 433 aa, Homo sapiens
MSGRPRTTSFAESCKPVQQPSAFGSMKVSRDKDGSKVTTVVATPGQGPDRPQEVSYTDTKVIGNGSFGVVYQAKLCDSGELVAIKKVLQDKRFKNRELQIMRKLDHCNIVRLRYFFYSSGEKKDEVYLNLVLDYVPETVYRVARHYSRAKQTLPVIYVKLYMYQLFRSLAYIHSFGICHRDIKPQNLLLDPDTAVLKLCDFGSAKQLVRGEPNVSYICSRYYRAPELIFGATDYTSSIDVWSAGCVLAELLLGQPIFPGDSGVDQLVEIIKVLGTPTREQIREMNPNYTEFKFPQIKAHPWTKDSSGTGHFTSGVRVFRPRTPPEAIALCSRLLEYTPTARLTPLEACAHSFFDELRDPNVKLPNGRDTPALFNFTTQELSSNPPLATILIPPHARIQAAASTPTNATAASDANTGDRGQTNNAASASASNST

SEQ ID NO: 369 - protein, 782 aa, Homo sapiens
MAPHRPAPALLCALSLALCALSLPVRAATASRGASQAGAPQGRVPEARPNSMVVEHPEFLKAGKEPGLQIWRVEKFDLVPVPTNLYGDFFTGDAYVILKTVQLRNGNLQYDLHYWLGNECSQDESGAAAIFTVQLDDYLNGRAVQHREVQGFESATFLGYFKSGLKYKKGGVASGFKHVVPNEVVVQRLFQVKGRRVVRATEVPVSWESFNNGDCFILDLGNNIHQWCGSNSNRYERLKATQVSKGIRDNERSGRARVHVSEEGTEPEAMLQVLGPKPALPAGTEDTAKEDAANRKLAKLYKVSNGAGTMSVSLVADENPFAQGALKSEDCFILDHGKDGKIFVWKGKQANTEERKAALKTASDFITKMDYPKQTQVSVLPEGGETPLFKQFFKNWRDPDQTDGLGLSYLSSHIANVERVPFDAATLHTSTAMAAQHGMDDDGTGQKQIWRIEGSNKVPVDPATYGQFYGGDSYIILYNYRHGGRQGQIIYNWQGAQSTQDEVAASAILTAQLDEELGGTPVQSRVVQGKEPAHLMSLFGGKPMIIYKGGTSREGGQTAPASTRLFQVRANSAGATRAVEVLPKAGALNSNDAFVLKTPSAAYLWVGTGASEAEKTGAQELLRVLRAQPVQVAEGSEPDGFWEALGGKAAYRTSPRLKDKKMDAHPPRLFACSNKIGRFVIEEVPGELMQEDLATDDVMLLDTWDQVFVWVGKDSQEEEKTEALTSAKRYIETDPANRDRRTPITVVKQGFEPPSFVGWFLGWDDDYWSVDPLDRAMAELAA

SEQ ID NO: 370 - protein, 218 aa, Homo sapiens
MPMILGYWDIRGLAHAIRLLLEYTDSSYEEKKYTMGDAPDYDRSQWLNEKFKLGLDFPNLPYLIDGAHKITQSNAILCYIARKHNLCGETEEEKIRVDILENQTMDNHMQLGMICYNPEFEKLKPKYLEELPEKLKLYSEFLGKRPWFAGNKITFVDFLVYDVLDLHRIFEPKCLDAFPNLKDFISRFEGLEKISAYMKSSRFLPRPVFSKMAVWGNK

SEQ ID NO: 371 - protein, 998 aa, Homo sapiens
MAQVAMSTLPVEDEESSESRMVVTFLMSALESMCKELAKSKAEVACIAVYETDVFVVGTERGRAFVNTRKDFQKDFVKYCVEEEEKAAEMHKMKSTTQANRMSVDAVEIETLRKTVEDYFCFCYGKALGKSTVVPVPYEKMLRDQSAVVVQGLPEGVAFKHPENYDLATLKWILENKAGISFIIKRPFLEPKKHVGGRVMVTDADRSILSPGGSCGPIKVKTEPTEDSGISLEMAAVTVKEESEDPDYYQYNIQAGPSETDDVDEKQPLSKPLQGSHHSSEGNEGTEMEVPAEDSTQHVPSETSEDPEVEVTIEDDDYSPPSKRPKANELPQPPVPEPANAGKRKVREFNFEKWNARITDLRKQVEELFERKYAQAIKAKGPVTIPYPLFQSHVEDLYVEGLPEGIPFRRPSTYGIPRLERILLAKERIRFVIKKHELLNSTREDLQLDKPASGVKEEWYARITKLRKMVDQLFCKKFAEALGSTEAKAVPYQKFEAHPNDLYVEGLPENIPFRSPSWYGIPRLEKIIQVGNRIKFVIKRPELLTHSTTEVTQPRTNTPVKEDWNVRITKLRKQVEEIFNLKFAQALGLTEAVKVPYPVFESNPEFLYVEGLPEGIPFRSPTWFGIPRLERIVRGSNKIKFVVKKPELVISYLPPGMASKINTKALQSPKRPRSPGSNSKVPEIEVTVEGPNNNNPQTSAVRTPTQTNGSNVPFKPRGREFSFEAWNAKITDLKQKVENLFNEKCGEALGLKQAVKVPFALFESFPEDFYVEGLPEGVPFRRPSTFGIPRLEKILRNKAKIKFIIKKPEMFETAIKESTSSKSPPRKINSSPNVNTTASGVEDLNIIQVTIPDDDNERLSKVEKARQLREQVNDLFSRKFGEAIGMGFPVKVPYRKITINPGCVVVDGMPPGVSFKAPSYLEISSMRRILDSAEFIKFTVIRPFPGLVINNQLVDQSESEGPVIQESAEPSQLEVPATEEIKETDGSSQIKQEPDPTW

SEQ ID NO: 372 - protein, 763 aa, Homo sapiens
MSRRKISSESFSSLGSDYLETSPEEEGECPLSRLCWNGSRSPPGPLEPSPAAAAAAAAPAPTPAASAAAAAATAGARRVQRRRRVNLDSLGESISRLTAPSPQTIQQTLKRTLQYYEHQVIGYRDAEKNFHNISNRCSYADHSNKEEIEDVSGILQCTANILGLKFEEIQKRFGEEFFNICFHENERVLRAVGGTLQDFFNGFDALLEHIRTSFGKQATLESPSFLCKELPEGTLMLHYFHPHHIVGFAMLGMIKAAGKKIYRLDVEVEQVANEKLCSDVSNPGNCSCLTFLIKECENTNIMKNLPQGTSQVPADLRISINTFCRAFPFHLMFDPSMSVLQLGEGLRKQLRCDTHKVLKFEDCFEIVSPKVNATFERVLLRLSTPFVIRTKPEASGSENKDKVMEVKGQMIHVPESNSILFLGSPCVDKLDELMGRGLHLSDIPIHDATRDVILVGEQAKAQDGLKKRMDKLKATLERTHQALEEEKKKTVDLLYSIFPGDVAQQLWQGQQVQARKFDDVTMLFSDIVGFTAICAQCTPMQVISMLNELYTRFDHQCGFLDIYKVETIGDAYCVAAGLHRKSLCHAKPIALMALKMMELSEEVLTPDGRPIQPQRSELLFSFPVSIQLVPDQHQSETDLGTEKMRIGIHSGSVLAGVVGVRMPRYCLFGNNVTLASKFESGSHPRRINVSPTTYQLLKREESFTFIPRSREELPDNFPKEIPGICYFLEVRTGPKPPKPSLSSSRIKKVSYNIGTMFLRETSL

SEQ ID NO: 373 - protein, 2035 aa, Homo sapiens
MASAVSPANLPAVLLQPRWKRVVGWSGPVPRPRHGHRAVAIKELIVVFGGGNEGIVDELHVYNTATNQWFIPAVRGDIPPGCAAYGFVCDGTRLLVFGGMVEYGKYSNDLYELQASRWEWKRLKAKTPKNGPPPCPRLGHSFSLVGNKCYLFGGLANDSEDPKNNIPRYLNDLYILELRPGSGVVAWDIPITYGVLPPPRESHTAVVYTEKDNKKSKLVIYGGMSGCRLGDLWTLDIDTLTWNKPSLSGVAPLPRSLHSATTIGNKMYVFGGWVPLVMDDVKVATHEKEWKCTNTLACLNLDTMAWETILMDTLEDNIPRARAGHCAVAINTRLYIWSGRDGYRKAWNNQVCCKDLWYLETEKPPPPARVQLVRANTNSLEVSWGAVATADSYLLQLQKYDIPATAATATSPTPNPVPSVPANPPKSPAPAAAAPAVQPLTQVGITLLPQAAPAPPTTTTIQVLPTVPGSSISVPTAARTQGVPAVLKVTGPQATTGTPLVTMRPASQAGKAPVTVTSLPAGVRMVVPTQSAQGTVIGSSPQMSGMAALAAAAAATQKIPPSSAPTVLSVPAGTTIVKTMAVTPGTTTLPATVKVASSPVMVSNPATRMLKTAAAQVGTSVSSATNTSTRPIITVHKSGTVTVAQQAQVVTTVVGGVTKTITLVKSPISVPGGSALISNLGKVMSVVQTKPVQTSAVTGQASTGPVTQIIQTKGPLPAGTILKLVTSADGKPTTIITTTQASGAGTKPTILGISSVSPSTTKPGTTTIIKTIPMSAIITQAGATGVTSSPGIKSPITIITTKVMTSGTGAPAKIITAVPKIATGHGQQGVTQVVLKGAPGQPGTILRTVPMGGVRLVTPVTVSAVKPAVTTLVVKGTTGVTTLGTVTGTVSTSLAGAGGHSTSASLATPITTLGTIATLSSQVINPTAITVSAAQTTLTAAGGLTTPTITMQPVSQPTQVTLITAPSGVEAQPVHDLPVSILASPTTEQPTATVTIADSGQGDVQPGTVTLVCSNPPCETHETGTTNTATTTVVANLGGHPQPTQVQFVCDRQEAAASLVTSTVGQQNGSVVRVCSNPPCETHETGTTNTATTATSNMAGQHGCSNPPCETHETGTTNTATTAMSSVGANHQRDARRACAAGTPAVIRISVATGALEAAQGSKSQCQTRQTSATSTTMTVMATGAPCSAGPLLGPSMAREPGGRSPAFVQLAPLSSKVRLSSPSIKDLPAGRHSHAVSTAAMTRSSVGAGEPRMAPVCESLQGGSPSTTVTVTALEALLCPSATVTQVCSNPPCETHETGTTNTATTSNAGSAQRVCSNPPCETHETGTTHTATTATSNGGTGQPEGGQQPPAGRPCETHQTTSTGTTMSVSVGALLPDATSSHRTVESGLEVAAAPSVTPQAGTALLAPFPTQRVCSNPPCETHETGTTHTATTVTSNMSSNQDPPPAASDQGEVESTQGDSVNITSSSAITTTVSSTLTRAVTTVTQSTPVPGPSVPPPEELQVSPGPRQQLPPRQLLQSASTALMGESAEVLSASQTPELPAAVDLSSTGEPSSGQESAGSAVVATVVVQPPPPTQSEVDQLSLPQELMAEAQAGTTTLMVTGLTPEELAVTAAAEAAAQAAATEEAQALAIQAVLQAAQQAVMGTGEPMDTSEAAATVTQAELGHLSAEGQEGQATTIPIVLTQQELAALVQQQQLQEAQAQQQHHHLPTEALAPADSLNDPAIESNCLNELAGTVPSTVALLPSTATESLAPSNTFVAPQPVVVASPAKLQAAATLTEVANGIESLGVKPDLPPPPSKAPMKKENQWFDVGVIKGTNVMVTHYFLPPDDAVPSDDDLGTVPDYNQLKKQELQPGTAYKFRVAGINACGRGPFSEISAFKTCLPGFPGAPCAIKISKSPDGAHLTWEPPSVTSGKIIEYSVYLAIQSSQAGGELKSSTPAQLAFMRVYCGPSPSCLVQSSSLSNAHIDYTTKPAIIFRIAARNEKGYGPATQVRWLQETSKDSSGTKPANKRPMSSPEMKSAPKKSKADGQ

SEQ ID NO: 374 - protein, 890 aa, Homo sapiens
MEGGGKPNSSSNSRDDGNSVFPAKASATGAGPAAAEKRLGTPPGGGGAGAKEHGNSVCFKVDGGGGGGGGGGGGEEPAGGFEDAEGPRRQYGFMQRQFTSMLQPGVNKFSLRMFGSQKAVEKEQERVKTAGFWIIHPYSDFRFYWDLIMLIMMVGNLVIIPVGITFFTEQTTTPWIIFNVASDTVFLLDLIMNFRTGTVNEDSSEIILDPKVIKMNYLKSWFVVDFISSIPVDYIFLIVEKGMDSEVYKTARALRIVRFTKILSLLRLLRLSRLIRYIHQWEEIFHMTYDLASAVVRIFNLIGMMLLLCHWDGCLQFLVPLLQDFPPDCWVSLNEMVNDSWGKQYSYALFKAMSHMLCIGYGAQAPVSMSDLWITMLSMIVGATCYAMFVGHATALIQSLDSSRRQYQEKYKQVEQYMSFHKLPADMRQKIHDYYEHRYQGKIFDEENILNELNDPLREEIVNFNCRKLVATMPLFANADPNFVTAMLSKLRFEVFQPGDYIIREGAVGKKMYFIQHGVAGVITKSSKEMKLTDGSYFGEICLLTKGRRTASVRADTYCRLYSLSVDNFNEVLEEYPMMRRAFETVAIDRLDRIGKKNSILLQKFQKDLNTGVFNNQENEILKQIVKHDREMVQAIAPINYPQMTTLNSTSSTTTPTSRMRTQSPPVYTATSLSHSNLHSPSPSTQTPQPSAILSPCSYTTAVCSPPVQSPLAARTFHYASPTASQLSLMQQQPQQQVQQSQPPQTQPQQPSPQPQTPGSSTPKNEVHKSTQALHNTNLTREVRPLSASQPSLPHEVSTLISRPHPTVGESLASIPQPVTAVPGTGLQAGGRSTVPQRVTLFRQMSSGAIPPNRGVPPAPPPPAAALPRESSSVLNTDPDAEKPRFASNL

SEQ ID NO: 375 - protein, 428 aa, Homo sapiens
MAKTVAYFYDPDVGNFHYGAGHPMKPHRLALTHSLVLHYGLYKKMIVFKPYQASQHDMCRFHSEDYIDFLQRVSPTNMQGFTKSLNAFNVGDDCPVFPGLFEFCSRYTGASLQGATQLNNKICDIAINWAGGLHHAKKFEASGFCYVNDIVIGILELLKYHPRVLYIDIDIHHGDGVQEAFYLTDRVMTVSFHKYGNYFFPGTGDMYEVGAESGRYYCLNVPLRDGIDDQSYKHLFQPVINQVVDFYQPTCIVLQCGADSLGCDRLGCFNLSIRGHGECVEYVKSFNIPLLVLGGGGYTVRNVARCWTYETSLLVEEAISEELPYSEYFEYFAPDFTLHPDVSTRIENQNSRQYLDQIRQTIFENLKMLNHAPSVQIHDVPADLLTYDRTDEADAEERGPEENYSRPEAPNEFYDGDHDNDKESDVEI

SEQ ID NO: 376 - protein, 1084 aa, Homo sapiens
MSSQSHPDGLSGRDQPVELLNPARVNHMPSTVDVATALPLQVAPSAVPMDLRLDHQFSLPVAEPALREQQLQQELLALKQKQQIQRQILIAEFQRQHEQLSRQHEAQLHEHIKQQQEMLAMKHQQELLEHQRKLERHRQEQELEKQHREQKLQQLKNKEKGKESAVASTEVKMKLQEFVLNKKKALAHRNLNHCISSDPRYWYGKTQHSSLDQSSPPQSGVSTSYNHPVLGMYDAKDDFPLRKTASEPNLKLRSRLKQKVAERRSSPLLRRKDGPVVTALKKRPLDVTDSACSSAPGSGPSSPNNSSGSVSAENGIAPAVPSIPAETSLAHRLVAREGSAAPLPLYTSPSLPNITLGLPATGPSAGTAGQQDAERLTLPALQQRLSLFPGTHLTPYLSTSPLERDGGAAHSPLLQHMVLLEQPPAQAPLVTGLGALPLHAQSLVGADRVSPSIHKLRQHRPLGRTQSAPLPQNAQALQHLVIQQQHQQFLEKHKQQFQQQQLQMNKIIPKPSEPARQPESHPEETEEELREHQALLDEPYLDRLPGQKEAHAQAGVQVKQEPIESDEEEAEPPREVEPGQRQPSEQELLFRQQALLLEQQRIHQLRNYQASMEAAGIPVSFGGHRPLSRAQSSPASATFPVSVQEPPTKPRFTTGLVYDTLMLKHQCTCGSSSSHPEHAGRIQSIWSRLQETGLRGKCECIRGRKATLEELQTVHSEAHTLLYGTNPLNRQKLDSKKLLGSLASVFVRLPCGGVGVDSDTIWNEVHSAGAARLAVGCVVELVFKVATGELKNGFAVVRPPGHHAEESTPMGFCYFNSVAVAAKLLQQRLSVSKILIVDWDVHHGNGTQQAFYSDPSVLYMSLHRYDDGNFFPGSGAPDEVGTGPGVGFNVNMAFTGGLDPPMGDAEYLAAFRTVVMPIASEFAPDVVLVSSGFDAVEGHPTPLGGYNLSARCFGYLTKQLMGLAGGRIVLALEGGHDLTAICDASEACVSALLGNELDPLPEKVLQQRPNANAVRSMEKVMEIHSKYWRCLQRTTSTAGRSLIEAQTCENEEAETVTAMASLSVGVKPAEKRPDEEPMEEEPPL

SEQ ID NO: 377 - protein, 1215 aa, Homo sapiens
MTSTGQDSTTTRQRRSRQNPQSPPQDSSVTSKRNIKKGAVPRSIPNLAEVKKKGKMKKLGQAMEEDLIVGLQGMDLNLEAEALAGTGLVLDEQLNEFHCLWDDSFPEGPERLHAIKEQLIQEGLLDRCVSFQARFAEKEELMLVHSLEYIDLMETTQYMNEGELRVLADTYDSVYLHPNSYSCACLASGSVLRLVDAVLGAEIRNGMAIIRPPGHHAQHSLMDGYCMFNHVAVAARYAQQKHRIRRVLIVDWDVHHGQGTQFTFDQDPSVLYFSIHRYEQGRFWPHLKASNWSTTGFGQGQGYTINVPWNQVGMRDADYIAAFLHVLLPVALEFQPQLVLVAAGFDALQGDPKGEMAATPAGFAQLTHLLMGLAGGKLILSLEGGYNLRALAEGVSASLHTLLGDPCPMLESPGAPCRSAQASVSCALEALEPFWEVLVRSTETVERDNMEEDNVEESEEEGPWEPPVLPILTWPVLQSRTGLVYDQNMMNHCNLWDSHHPEVPQRILRIMCRLEELGLAGRCLTLTPRPATEAELLTCHSAEYVGHLRATEKMKTRELHRESSNFDSIYICPSTFACAQLATGAACRLVEAVLSGEVLNGAAVVRPPGHHAEQDAACGFCFFNSVAVAARHAQTISGHALRILIVDWDVHHGNGTQHMFEDDPSVLYVSLHRYDHGTFFPMGDEGASSQIGRAAGTGFTVNVAWNGPRMGDADYLAAWHRLVLPIAYEFNPELVLVSAGFDAARGDPLGGCQVSPEGYAHLTHLLMGLASGRIILILEGGYNLTSISESMAACTRSLLGDPPPLLTLPRPPLSGALASITETIQVHRRYWRSLRVMKVEDREGPSSSKLVTKKAPQPAKPRLAERMTTREKKVLEAGMGKVTSASFGEESTPGQTNSETAVVALTQDQPSEAATGGATLAQTISEAAIGGAMLGQTTSEEAVGGATPDQTTSEETVGGAILDQTTSEDAVGGATLGQTTSEEAVGGATLAQTTSEAAMEGATLDQTTSEEAPGGTELIQTPLASSTDHQTPPTSPVQGTTPQISPSTLIGSLRTLELGSESQGASESQAPGEENLLGEAAGGQDMADSMLMQGSRGLTDQAIFYAVTPLPWCPHLVAVCPIPAAGLDVTQPCGDCGTIQENWVCLSCYQVYCGRYINGHMLQHHGNSGHPLVLSYIDLSAWCYYCQAYVHHQALLDVKNIAHQNKFGEDMPHPH

SEQ ID NO: 378 - protein, 662 aa, Homo sapiens
MMEPEEYRERGREMVDYICQYLSTVRERRVTPDVQPGYLRAQLPESAPEDPDSWDSIFGDIERIIMPGVVHWQSPHMHAYYPALTSWPSLLGDMLADAINCLGFTWASSPACTELEMNVMDWLAKMLGLPEHFLHHHPSSQGGGVLQSTVSESTLIALLAARKNKILEMKTSEPDADESCLNARLVAYASDQAHSSVEKAGLISLVKMKFLPVDDNFSLRGEALQKAIEEDKQRGLVPVFVCATLGTTGVCAFDCLSELGPICAREGLWLHIDAAYAGTAFLCPEFRGFLKGIEYADSFTFNPSKWMMVHFDCTGFWVKDKYKLQQTFSVNPIYLRHANSGVATDFMHWQIPLSRRFRSVKLWFVIRSFGVKNLQAHVRHGTEMAKYFESLVRNDPSFEIPAKRHLGLVVFRLKGPNCLTENVLKEIAKAGRLFLIPATIQDKLIIRFTVTSQFTTRDDILRDWNLIRDAATLILSQHCTSQPSPRVGNLISQIRGARAWACGTSLQSVSGAGDDPVQARKIIKQPQRVGAGPMKRENGLHLETLLDPVDDCFSEEAPDATKHKLSSFLFSYLSVQTKKKTVRSLSCNSVPVSAQKPLPTEASVKNGGSSRVRIFSRFPEDMMMLKKSAFKKLIKFYSVPSFPECSSQCGLQLPCCPLQAMV

SEQ ID NO: 379 - protein, 1572 aa, Homo sapiens
MASSAREHLLFVRRRNPQMRYTLSPENLQSLAAQSSMPENMTLQRANSDTDLVTSESRSSLTASMYEYTLGQAQNLIIFWDIKEEVDPSDWIGLYHIDENSPANFWDSKNRGVTGTQKGQIVWRIEPGPYFMEPEIKICFKYYHGISGALRATTPCITVKNPAVMMGAEGMEGGASGNLHSRKLVSFTLSDLRAVGLKKGMFFNPDPYLKMSIQPGKKSSFPTCAHHGQERRSTIISNTTNPIWHREKYSFFALLTDVLEIEIKDKFAKSRPIIKRFLGKLTIPVQRLLERQAIGDQMLSYNLGRRLPADHVSGYLQFKVEVTSSVHEDASPEAVGTILGVNSVNGDLGSPSDDEDMPGSHHDSQVCSNGPVSEDSAADGTPKHSFRTSSTLEIDTEELTSTSSRTSPPRGRQDSLNDYLDAIEHNGHSRPGTATCSERSMGASPKLRSSFPTDTRLNAMLHIDSDEEDHEFQQDLGYPSSLEEEGGLIMFSRASRADDGSLTSQTKLEDNPVENEEASTHEAASFEDKPENLPELAESSLPAGPAPEEGEGGPEPQPSADQGSAELCGSQEVDQPTSGADTGTSDASGGSRRAVSETESLDQGSEPSQVSSETEPSDPARTESVSEASTRPEGESDLECADSSCNESVTTQLSSVDTRCSSLESARFPETPAFSSQEEEDGACAAEPTSSGPAEGSQESVCTAGSLPVVQVPSGEDEGPGAESATVPDQEELGEVWQRRGSLEGAAAAAESPPQEEGSAGEAQGTCEGATAQEEGATGGSQANGHQPLRSLPSVRQDVSRYQRVDEALPPNWEARIDSHGRIFYVDHVNRTTTWQRPTAPPAPQVLQRSNSIQQMEQLNRRYQSIRRTMTNERPEENTNAIDGAGEEADFHQASADFRRENILPHSTSRSRITLLLQSPPVKFLISPEFFTVLHSNPSAYRMFTNNTCLKHMITKVRRDTHHFERYQHNRDLVGFLNMFANKQLELPRGWEMKHDHQGKAFFVDHNSRTTTFIDPRLPLQSSRPTSALVHRQHLTRQRSHSAGEVGEDSRHAGPPVLPRPSSTFNTVSRPQYQDMVPVAYNDKIVAFLRQPNIFEILQERQPDLTRNHSLREKIQFIRTEGTPGLVRLSSDADLVMLLSLFEEEIMSYVPPHALLHPSYCQSPRGSPVSSPQNSPGTQRANARAPAPYKRDFEAKLRNFYRKLETKGYGQGPGKLKLIIRRDHLLEDAFNQIMGYSRKDLQRNKLYVTFVGEEGLDYSGPSREFFFLVSRELFNPYYGLFEYSANDTYTVQISPMSAFVDNHHEWFRFSGRILGLALIHQYLLDAFFTRPFYKALLRILCDLSDLEYLDEEFHQSLQWMKDNDIHDILDLTFTVNEEVFGQITERELKPGGANIPVTEKNKKEYIERMVKWRIERGVVQQTESLVRGFYEVVDARLVSVFDARELELVIAGTAEIDLSDWRNNTEYRGGYHDNHIVIRWFWAAVERFNNEQRLRLLQFVTGTSSIPYEGFASLRGSNGPRRFCVEKWGKITALPRAHTCFNRLDLPPYPSFSMLYEKLLTAVEETSTFGLE

SEQ ID NO: 380 - protein, 416 aa, Homo sapiens
MKRERGALSRASRALRLAPFVYLLLIQTDPLEGVNITSPVRLIHGTVGKSALLSVQYSSTSSDRPVVKWQLKRDKPVTVVQSIGTEVIGTLRPDYRDRIRLFENGSLLLSDLQLADEGTYEVEISITDDTFTGEKTINLTVDVPISRPQVLVASTTVLELSEAFTLNCSHENGTKPSYTWLKDGKPLLNDSRMLLSPDQKVLTITRVLMEDDDLYSCMVENPISQGRSLPVKITVYRRSSLYIILSTGGIFLLVTLVTVCACWKPSKRKQKKLEKQNSLEYMDQNDDRLKPEADTLPRSGEQERKNPMALYILKDKDSPETEENPAPEPRSATEPGPPGYSVSPAVPGRSPGLPIRSARRYPRSPARSPATGRTHSSPPRAPSSPGRSRSASRTLRTAGVHIIREQDEAGPVEISA

SEQ ID NO: 381 - protein, 4834 aa, Homo sapiens
MPSESFCLAAQARLDSKWLKTDIQLAFTRDGLCGLWNEMVKDGEIVYTGTESTQNGELPPRKDDSVEPSGTKKEDLNDKEKKDEEETPAPIYRAKSILDSWVWGKQPDVNELKECLSVLVKEQQALAVQSATTTLSALRLKQRLVILERYFIALNRTVFQENVKVKWKSSGISLPPVDKKSSRPAGKGVEGLARVGSRAALSFAFAFLRRAWRSGEDADLCSELLQESLDALRALPEASLFDESTVSSVWLEVVERATRFLRSVVTGDVHGTPATKGPGSIPLQDQHLALAILLELAVQRGTLSQMLSAILLLLQLWDSGAQETDNERSAQGTSAPLLPLLQRFQSIICRKDAPHSEGDMHLLSGPLSPNESFLRYLTLPQDNELAIDLRQTAVVVMAHLDRLATPCMPPLCSSPTSHKGSLQEVIGWGLIGWKYYANVIGPIQCEGLANLGVTQIACAEKRFLILSRNGRVYTQAYNSDTLAPQLVQGLASRNIVKIAAHSDGHHYLALAATGEVYSWGCGDGGRLGHGDTVPLEEPKVISAFSGKQAGKHVVHIACGSTYSAAITAEGELYTWGRGNYGRLGHGSSEDEAIPMLVAGLKGLKVIDVACGSGDAQTLAVTENGQVWSWGDGDYGKLGRGGSDGCKTPKLIEKLQDLDVVKVRCGSQFSIALTKDGQVYSWGKGDNQRLGHGTEEHVRYPKLLEGLQGKKVIDVAAGSTHCLALTEDSEVHSWGSNDQCQHFDTLRVTKPEPAALPGLDTKHIVGIACGPAQSFAWSSCSEWSIGLRVPFVVDICSMTFEQLDLLLRQVSEGMDGSADWPPPQEKECVAVATLNLLRLQLHAAISHQVDPEFLGLGLGSILLNSLKQTVVTLASSAGVLSTVQSAAQAVLQSGWSVLLPTAEERARALSALLPCAVSGNEVNISPGRRFMIDLLVGSLMADGGLESALHAAITAEIQDIEAKKEAQKEKEIDEQEANASTFHRSRTPLDKDLINTGICESSGKQCLPLVQLIQQLLRNIASQTVARLKDVARRISSCLDFEQHSRERSASLDLLLRFQRLLISKLYPGESIGQTSDISSPELMGVGSLLKKYTALLCTHIGDILPVAASIASTSWRHFAEVAYIVEGDFTGVLLPELVVSIVLLLSKNAGLMQEAGAVPLLGGLLEHLDRFNHLAPGKERDDHEELAWPGIMESFFTGQNCRNNEEVTLIRKADLENHNKDGGFWTVIDGKVYDIKDFQTQSLTGNSILAQFAGEDPVVALEAALQFEDTRESMHAFCVGQYLEPDQEIVTIPDLGSLSSPLIDTERNLGLLLGLHASYLAMSTPLSPVEIECAKWLQSSIFSGGLQTSQIHYSYNEEKDEDHCSSPGGTPASKSRLCSHRRALGDHSQAFLQAIADNNIQDHNVKDFLCQIERYCRQCHLTTPIMFPPEHPVEEVGRLLLCCLLKHEDLGHVALSLVHAGALGIEQVKHRTLPKSVVDVCRVVYQAKCSLIKTHQEQGRSYKEVCAPVIERLRFLFNELRPAVCNDLSIMSKFKLLSSLPRWRRIAQKIIRERRKKRVPKKPESTDDEEKIGNEESDLEEACILPHSPINVDKRPIAIKSPKDKWQPLLSTVTGVHKYKWLKQNVQGLYPQSPLLSTIAEFALKEEPVDVEKMRKCLLKQLERAEVRLEGIDTILKLASKNFLLPSVQYAMFCGWQRLIPEGIDIGEPLTDCLKDVDLIPPFNRMLLEVTFGKLYAWAVQNIRNVLMDASAKFKELGIQPVPLQTITNENPSGPSLGTIPQARFLLVMLSMLTLQHGANNLDLLLNSGMLALTQTALRLIGPSCDNVEEDMNASAQGASATVLEETRKETAPVQLPVSGPELAAMMKIGTRVMRGVDWKWGDQDGPPPGLGRVIGELGEDGWIRVQWDTGSTNSYRMGKEGKYDLKLAELPAAAQPSAEDSDTEDDSEAEQTERNIHPTAMMFTSTINLLQTLCLSAGVHAEIMQSEATKTLCGLLRMLVESGTTDKTSSPNRLVYREQHRSWCTLGFVRSIALTPQVCGALSSPQWITLLMKVVEGHAPFTATSLQRQILAVHLLQAVLPSWDKTERARDMKCLVEKLFDFLGSLLTTCSSDVPLLRESTLRRRRVRPQASLTATHSSTLAEEVVALLRTLHSLTQWNGLINKYINSQLRSITHSFVGRPSEGAQLEDYFPDSENPEVGGLMAVLAVIGGIDGRLRLGGQVMHDEFGEGTVTRITPKGKITVQFSDMRTCRVCPLNQLKPLPAVAFNVNNLPFTEPMLSVWAQLVNLAGSKLEKHKIKKSTKQAFAGQVDLDLLRCQQLKLYILKAGRALLSHQDKLRQILSQPAVQETGTVHTDDGAVVSPDLGDMSPEGPQPPMILLQQLLASATQPSPVKAIFDKQELEAAALAVCQCLAVESTHPSSPGFEDCSSSEATTPVAVQHIRPARVKRRKQSPVPALPIVVQLMEMGFSRRNIEFALKSLTGASGNASSLPGVEALVGWLLDHSDIQVTELSDADTVSDEYSDEEVVEDVDDAAYSMSTGAVVTESQTYKKRADFLSNDDYAVYVRENIQVGMMVRCCRAYEEVCEGDVGKVIKLDRDGLHDLNVQCDWQQKGGTYWVRYIHVELIGYPPPSSSSHIKIGDKVRVKASVTTPKYKWGSVTHQSVGVVKAFSANGKDIIVDFPQQSHWTGLLSEMELVPSIHPGVTCDGCQMFPINGSRFKCRNCDDFDFCETCFKTKKHNTRHTFGRINEPGQSAVFCGRSGKQLKRCHSSQPGMLLDSWSRMVKSLNVSSSVNQASRLIDGSEPCWQSSGSQGKHWIRLEIFPDVLVHRLKMIVDPADSSYMPSLVVVSGGNSLNNLIELKTININPSDTTVPLLNDCTEYHRYIEIAIKQCRSSGIDCKIHGLILLGRIRAEEEDLAAVPFLASDNEEEEDEKGNSGSLIRKKAAGLESAATIRTKVFVWGLNDKDQLGGLKGSKIKVPSFSETLSALNVVQVAGGSKSLFAVTVEGKVYACGEATNGRLGLGISSGTVPIPRQITALSSYVVKKVAVHSGGRHATALTVDGKVFSWGEGDDGKLGHFSRMNCDKPRLIEALKTKRIRDIACGSSHSAALTSSGELYTWGLGEYGRLGHGDNTTQLKPKMVKVLLGHRVIQVACGSRDAQTLALTDEGLVFSWGDGDFGKLGRGGSEGCNIPQNIERLNGQGVCQIECGAQFSLALTKSGVVWTWGKGDYFRLGHGSDVHVRKPQVVEGLRGKKIVHVAVGALHCLAVTDSGQVYAWGDNDHGQQGNGTTTVNRKPTLVQGLEGQKITRVACGSSHSVAWTTVDVATPSVHEPVLFQTARDPLGASYLGVPSDADSSAASNKISGASNSKPNRPSLAKILLSLDGNLAKQQALSHILTALQIMYARDAVVGALMPAAMIAPVECPSFSSAAPSDASAMASPMNGEECMLAVDIEDRLSPNPWQEKREIVSSEDAVTPSAVTPSAPSASARPFIPVTDDLGAASIIAETMTKTKEDVESQNKAAGPEPQALDEFTSLLIADDTRVVVDLLKLSVCSRAGDRGRDVLSAVLSGMGTAYPQVADMLLELCVTELEDVATDSQSGRLSSQPVVVESSHPYTDDTSTSGTVKIPGAEGLRVEFDRQCSTERRHDPLTVMDGVNRIVSVRSGREWSDWSSELRIPGDELKWKFISDGSVNGWGWRFTVYPIMPAAGPKELLSDRCVLSCPSMDLVTCLLDFRLNLASNRSIVPRLAASLAACAQLSALAASHRMWALQRLRKLLTTEFGQSININRLLGENDGETRALSFTGSALAALVKGLPEALQRQFEYEDPIVRGGKQLLHSPFFKVLVALACDLELDTLPCCAETHKWAWFRRYCMASRVAVALDKRTPLPRLFLDEVAKKIRELMADSENMDVLHESHDIFKREQDEQLVQWMNRRPDDWTLSAGGSGTIYGWGHNHRGQLGGIEGAKVKVPTPCEALATLRPVQLIGGEQTLFAVTADGKLYATGYGAGGRLGIGGTESVSTPTLLESIQHVFIKKVAVNSGGKHCLALSSEGEVYSWGEAEDGKLGHGNRSPCDRPRVIESLRGIEVVDVAAGGAHSACVTAAGDLYTWGKGRYGRLGHSDSEDQLKPKLVEALQGHRVVDIACGSGDAQTLCLTDDDTVWSWGDGDYGKLGRGGSDGCKVPMKIDSLTGLGVVKVECGSQFSVALTKSGAVYTWGKGDYHRLGHGSDDHVRRPRQVQGLQGKKVIAIATGSLHCVCCTEDGEVYTWGDNDEGQLGDGTTNAIQRPRLVAALQGKKVNRVACGSAHTLAWSTSKPASAGKLPAQVPMEYNHLQEIPIIALRNRLLLLHHLSELFCPCIPMFDLEGSLDETGLGPSVGFDTLRGILISQGKEAAFRKVVQATMVRDRQHGPVVELNRIQVKRSRSKGGLAGPDGTKSVFGQMCAKMSSFGPDSLLLPHRVWKVKFVGESVDDCGGGYSESIAEICEELQNGLTPLLIVTPNGRDESGANRDCYLLSPAARAPVHSSMFRFLGVLLGIAIRTGSPLSLNLAEPVWKQLAGMSLTIADLSEVDKDFIPGLMYIRDNEATSEEFEAMSLPFTVPSASGQDIQLSSKHTHITLDNRAEYVRLAINYRLHEFDEQVAAVREGMARVVPVPLLSLFTGYELETMVCGSPDIPLHLLKSVATYKGIEPSASLIQWFWEVMESFSNTERSLFLRFVWGRTRLPRTIADFRGRDFVIQVLDKYNPPDHFLPESYTCFFLLKLPRYSCKQVLEEKLKYAIHFCKSIDTDDYARIALTGEPAADDSSDDSDNEDVDSFASDSTQDYLTGH

SEQ ID NO: 382-383 - skipped (2 entries)

SEQ ID NO: 384 - protein, 2406 aa, Homo sapiens
MDPEQSVKGTKKAEGSPRKRLTKGEAIQTSVSSSVPYPGSGTAATQESPAQELLAPQPFPGPSSVLREGSQEKTGQQQKPPKRPPIEASVHISQLPQHPLTPAFMSPGKPEHLLEGSTWQLVDPMRPGPSGSFVAPGLHPQSQLLPSHASIIPPEDLPGVPKVFVPRPSQVSLKPTEEAHKKERKPQKPGKYICQYCSRPCAKPSVLQKHIRSHTGERPYPCGPCGFSFKTKSNLYKHRKSHAHRIKAGLASGMGGEMYPHGLEMERIPGEEFEEPTEGESTDSEEETSATSGHPAELSPRPKQPLLSSGLYSSGSHSSSHERCSLSQSSTAQSLEDPPPFVEPSSEHPLSHKPEDTHTIKQKLALRLSERKKVIDEQAFLSPGSKGSTESGYFSRSESAEQQVSPPNTNAKSYAEIIFGKCGRIGQRTAMLTATSTQPLLPLSTEDKPSLVPLSVPRTQVIEHITKLITINEAVVDTSEIDSVKPRRSSLSRRSSMESPKSSLYREPLSSHSEKTKPEQSLLSLQHPPSTAPPVPLLRSHSMPSAACTISTPHHPFRGSYSFDDHITDSEALSHSSHVFTSHPRMLKRQPAIELPLGGEYSSEEPGPSSKDTASKPSDEVEPKESELTKKTKKGLKTKGVIYECNICGARYKKRDNYEAHKKYYCSELQIAKPISAGTHTSPEAEKSQIEHEPWSQMMHYKLGTTLELTPLRKRRKEKSLGDEEEPPAFESTKSQFGSPGPSDAARNLPLESTKSPAEPSKSVPSLEGPTGFQPRTPKPGSGSESGKERRTTSKEISVIQHTSSFEKSDSLEQPSGLEGEDKPLAQFPSPPPAPHGRSAHSLQPKLVRQPNIQVPEILVTEEPDRPDTEPEPPPKEPEKTEEFQWPQRSQTLAQLPAEKLPPKKKRLRLAEMAQSSGESSFESSVPLSRSPSQESNVSLSGSSRSASFERDDHGKAEAPSPSSDMRPKPLGTHMLTVPSHHPHAREMRRSASEQSPNVSHSAHMTETRSKSFDYGSLSLTGPSAPAPVAPPARVAPPERRKCFLVRQASLSRPPESELEVAPKGRQESEEPQPSSSKPSAKSSLSQISSAATSHGGPPGGKGPGQDRPPLGPTVPYTEALQVFHHPVAQTPLHEKPYLPPPVSLFSFQHLVQHEPGQSPEFFSTQAMSSLLSSPYSMPPLPPSLFQAPPLPLQPTVLHPGQLHLPQLMPHPANIPFRQPPSFLPMPYPTSSALSSGFFLPLQSQFALQLPGDVESHLPQIKTSLAPLATGSAGLSPSTEYSSDIRLPPVAPPASSSAPTSAPPLALPACPDTMVSLVVPVRVQTNMPSYGSAMYTTLSQILVTQSQGSSATVALPKFEEPPSKGTTVCGADVHEVGPGPSGLSEEQSRAFPTPYLRVPVTLPERKGTSLSSESILSLEGSSSTAGGSKRVLSPAGSLELTMETQQQKRVKEEEASKADEKLELVKPCSVVLTSTEDGKRPEKSHLGNQGQGRRELEMLSSLSSDPSDTKEIPPLPHPALSHGTAPGSEALKEYPQPSGKPHRRGLTPLSVKKEDSKEQPDLPSLAPPSSLPLSETSSRPAKSQEGTDSKKVLQFPSLHTTTNVSWCYLNYIKPNHIQHADRRSSVYAGWCISLYNPNLPGVSTKAALSLLRSKQKVSKETYTMATAPHPEAGRLVPSSSRKPRMTEVHLPSLVSPEGQKDLARVEKEEERRGEPEEDAPASQRGEPARIKIFEGGYKSNEEYVYVRGRGRGKYVCEECGIRCKKPSMLKKHIRTHTDVRPYVCKHCHFAFKTKGNLTKHMKSKAHSKKCQETGVLEELEAEEGTSDDLFQDSEGREGSEAVEEHQFSDLEDSDSDSDLDEDEDEDEEESQDELSRPSSEAPPPGPPHALRADSSPILGPQPPDAPASGTEATRGSSVSEAERLTASSCSMSSQSMPGLPWLGPAPLGSVEKDTGSALSYKPVSPRRPWSPSKEAGSRPPLARKHSLTKNDSSPQRCSPAREPQASAPSPPGLHVDPGRGMGALPCGSPRLQLSPLTLCPLGRELAPRAHVLSKLEGTTDPGLPRYSPTRRWSPGQAESPPRSAPPGKWALAGPGSPSAGEHGPGLGLDPRVLFPPAPLPHKLLSRSPETCASPWQKAESRSPSCSPGPAHPLSSRPFSALHDFHGHILARTEENIFSHLPLHSQHLTRAPCPLIPIGGIQMVQARPGAHPTLLPGPTAAWVSGFSGGGSDLTGAREAQERGRWSPTESSSASVSPVAKVSKFTLSSELEGGDYPKERERTGGGPGRPPDWTPHGTGAPAEPTPTHSPCTPPDTLPRPPQGRRAAQSWSPRLESPRAPTNPEPSATPPLDRSSSVGCLAEASARFPARTRNLSGEPRTRQDSPKPSGSGEPRAHPHQPEDRVPPNA

SEQ ID NO: 385 - protein, 365 aa, Homo sapiens
MAVMAPRTLLLLLSGALALTQTWAGSHSMRYFFTSVSRPGRGEPRFIAVGYVDDTQFVRFDSDAASQKMEPRAPWIEQEGPEYWDQETRNMKAHSQTDRANLGTLRGYYNQSEDGSHTIQIMYGCDVGPDGRFLRGYRQDAYDGKDYIALNEDLRSWTAADMAAQITKRKWEAVHAAEQRRVYLEGRCVDGLRRYLENGKETLQRTDPPKTHMTHHPISDHEATLRCWALGFYPAEITLTWQRDGEDQTQDTELVETRPAGDGTFQKWAAVVVPSGEEQRYTCHVQHEGLPKPLTLRWELSSQPTIPIVGIIAGLVLLGAVITGAVVAAVMWRRKSSDRKGGSYTQAASSDSAQGSDVSLTACKV

SEQ ID NO: 386-392 - skipped (7 entries)

SEQ ID NO: 393 - protein, 362 aa, Homo sapiens
MLVMAPRTVLLLLSAALALTETWAGSHSMRYFYTSVSRPGRGEPRFISVGYVDDTQFVRFDSDAASPREEPRAPWIEQEGPEYWDRNTQIYKAQAQTDRESLRNLRGYYNQSEAGSHTLQSMYGCDVGPDGRLLRGHDQYAYDGKDYIALNEDLRSWTAADTAAQITQRKWEAAREAEQRRAYLEGECVEWLRRYLENGKDKLERADPPKTHVTHHPISDHEATLRCWALGFYPAEITLTWQRDGEDQTQDTELVETRPAGDRTFQKWAAVVVPSGEEQRYTCHVQHEGLPKPLTLRWEPSSQSTVPIVGIVAGLAVLAVVVIGAVVAAVMCRRKSSGGKGGSYSQAACSDSAQGSDVSLTA

SEQ ID NO: 394-398 - skipped (5 entries)

SEQ ID NO: 399 - protein, 266 aa, Homo sapiens
MVCLRLPGGSCMAVLTVTLMVLSSPLALAGDTRPRFLEYSTSECHFFNGTERVRYLDRYFHNQEENVRFDSDVGEFRAVTELGRPDAEYWNSQKDLLEQKRGRVDNYCRHNYGVVESFTVQRRVHPKVTVYPSKTQPLQHHNLLVCSVSGFYPGSIEVRWFRNGQEEKTGVVSTGLIHNGDWTFQTLVMLETVPRSGEVYTCQVEHPSVTSPLTVEWRARSESAQSKMLSGVGGFVLGLLFLGAGLFIYFRNQKGHSGLQPRGFLS

SEQ ID NO: 400-404 - skipped (5 entries)

SEQ ID NO: 405 - protein, 100 aa, Homo sapiens
MPKRKVSSAEGAAKEEPKRRSARLSAKPPAKVEAKPKKAAAKDKSSDKKVQTKGKRGAKGKQAEVANQETKEDLPAENGETKTEESPASDEAGEKEAKSD

SEQ ID NO: 406 - protein, 449 aa, Homo sapiens
MMLSTEGREGFVVKVRGLPWSCSADEVMRFFSDCKIQNGTSGIRFIYTREGRPSGEAFVELESEEEVKLALKKDRETMGHRYVEVFKSNSVEMDWVLKHTGPNSPDTANDGFVRLRGLPFGCSKEEIVQFFSGLEIVPNGMTLPVDFQGRSTGEAFVQFASQEIAEKALKKHKERIGHRYIEIFKSSRAEVRTHYDPPRKLMAMQRPGPYDRPGAGRGYNSIGRGAGFERMRRGAYGGGYGGYDDYGGYNDGYGFGSDRFGRDLNYCFSGMSDHRYGDGGSSFQSTTGHCVHMRGLPYRATENDIYNFFSPLNPMRVHIEIGPDGRVTGEADVEFATHEDAVAAMAKDKANMQHRYVELFLNSTAGTSGGAYDHSYVELFLNSTAGASGGAYGSQMMGGMGLSNQSSYGGPASQQLSGGYGGGYGGQSSMSGYDQVLQENSSDYQSNLA

SEQ ID NO: 407 - protein, 354 aa, Homo sapiens
MGEQPIFSTRAHVFQIDPNTKKNWVPTSKHAVTVSYFYDSTRNVYRIISLDGSKAIINSTITPNMTFTKTSQKFGQWADSRANTVYGLGFSSEHHLSKFAEKFQEFKEAARLAKEKSQEKMELTSTPSQESAGGDLQSPLTPESINGTDDERTPDVTQNSEPRAEPTQNALPFSHSSAISKHWEAELATLKGNNAKLTAALLESTANVKQWKQQLAAYQEEAERLHKRVTELECVSSQANAVHTHKTELNQTIQELEETLKLKEEEIERLKQEIDNARELQEQRDSLTQKLQEVEIRNKDLEGQLSDLEQRLEKSQNEQEAFRNNLKTLLEILDGKIFELTELRDNLAKLLECS

SEQ ID NO: 408 - protein, 335 aa, Homo sapiens
MDNARMNSFLEYPILSSGDSGTCSARAYPSDHRITTFQSCAVSANSCGGDDRFLVGRGVQIGSPHHHHHHHHHHPQPATYQTSGNLGVSYSHSSCGPSYGSQNFSAPYSPYALNQEADVSGGYPQCAPAVYSGNLSSPMVQHHHHHQGYAGGAVGSPQYIHHSYGQEHQSLALATYNNSLSPLHASHQEACRSPASETSSPAQTFDWMKVKRNPPKTGKVGEYGYLGQPNAVRTNFTTKQLTELEKEFHFNKYLTRARRVEIAASLQLNETQVKIWFQNRRMKQKKREKEGLLPISPATPPGNDEKAEESSEKSSSSPCVPSPGSSTSDTLTTSH

SEQ ID NO: 409 - protein, 301 aa, Homo sapiens
MDYNRMNSFLEYPLCNRGPSAYSAHSAPTSFPPSSAQAVDSYASEGRYGGGLSSPAFQQNSGYPAQQPPSTLGVPFPSSAPSGYAPAACSPSYGPSQYYPLGQSEGDGGYFHPSSYGAQLGGLSDGYGAGGAGPGPYPPQHPPYGNEQTASFAPAYADLLSEDKETPCPSEPNTPTARTFDWMKVKRNPPKTAKVSEPGLGSPSGLRTNFTTRQLTELEKEFHFNKYLSRARRVEIAATLELNETQVKIWFQNRRMKQKKREREEGRVPPAPPGCPKEAAGDASDQSTCTSPEASPSSVTS

SEQ ID NO: 410 - protein, 189 aa, Homo sapiens
MTEYKLVVVGAGGVGKSALTIQLIQNHFVDEYDPTIEDSYRKQVVIDGETCLLDILDTAGQEEYSAMRDQYMRTGEGFLCVFAINNTKSFEDIHQYREQIKRVKDSDDVPMVLVGNKCDLAARTVESRQAQDLARSYGIPYIETSAKTRQGVEDAFYTLVREIRQHKLRKLNPPDESGPGCMSCKCVLS

SEQ ID NO: 411 - skipped

SEQ ID NO: 412 - protein, 346 aa, Homo sapiens
MLFKQQAWLRQKLLVLGSLAVGSLLYLVARVGSLDRLQPICPIEGRLGGARTQAEFPLRALQFKRGLLHEFRKGNASKEQVRLHDLVQQLPKAIIIGVRKGGTRALLEMLNLHPAVVKASQEIHFFDNDENYGKGIEWYRKKMPFSYPQQITIEKSPAYFITEEVPERIYKMNSSIKLLIIVREPTTRAISDYTQVLEGKERKNKTYYKFEKLAIDPNTCEVNTKYKAVRTSIYTKHLERWLKYFPIEQFHVVDGDRLITEPLPELQLVEKFLNLPPRISQYNLYFNATRGFYCLRFNIIFNKCLAGSKGRIHPEVDPSVITKLRKFFHPFNQKFYQITGRTLNWP

SEQ ID NO: 413 - protein, 292 aa, Homo sapiens
MAFMKKYLLPILGLFMAYYYYSANEEFRPEMLQGKKVIVTGASKGIGREMAYHLAKMGAHVVVTARSKETLQKVVSHCLELGAASAHYIAGTMEDMTFAEQFVAQAGKLMGGLDMLILNHITNTSLNLFHDDIHHVRKSMEVNFLSYVVLTVAALPMLKQSNGSIVVVSSLAGKVAYPMVAAYSASKFALDGFFSSIRKEYSVSRVNVSITLCVLGLIDTETAMKAVSGIVHMQAAPKEECALEIIKGGALRQEEVYYDSSLWTTLLIRNPCRKILEFLYSTSYNMDRFINK

SEQ ID NO: 414 - protein, 390 aa, Homo sapiens
MEEPGAQCAPPPPAGSETWVPQANLSSAPSQNCSAKDYIYQDSISLPWKVLLVMLLALITLATTLSNAFVIATVYRTRKLHTPANYLIASLAVTDLLVSILVMPISTMYTVTGRWTLGQVVCDFWLSSDITCCTASILHLCVIALDRYWAITDAVEYSAKRTPKRAAVMIALVWVFSISISLPPFFWRQAKAEEEVSECVVNTDHILYTVYSTVGAFYFPTLLLIALYGRIYVEARSRILKQTPNRTGKRLTRAQLITDSPGSTSSVTSINSRVPDVPSESGSPVYVNQVKVRVSDALLEKKKLMAARERKATKTLGIILGAFIVCWLPFFIISLVMPICKDACWFHLAIFDFFTWLGYLNSLINPIIYTMSNEDFKQAFHKLIRFKCTS

SEQ ID NO: 415 - protein, 471 aa, Homo sapiens
MDILCEENTSLSSTTNSLMQLNDDTRLYSNDFNSGEANTSDAFNWTVDSENRTNLSCEGCLSPSCLSLLHLQEKNWSALLTAVVIILTIAGNILVIMAVSLEKKLQNATNYFLMSLAIADMLLGFLVMPVSMLTILYGYRWPLPSKLCAVWIYLDVLFSTASIMHLCAISLDRYVAIQNPIHHSRFNSRTKAFLKIIAVWTISVGISMPIPVFGLQDDSKVFKEGSCLLADDNFVLIGSFVSFFIPLTIMVITYFLTIKSLQKEATLCVSDLGTRAKLASFSFLPQSSLSSEKLFQRSIHREPGSYTGRRTMQSISNEQKACKVLGIVFFLFVVMWCPFFITNIMAVICKESCNEDVIGALLNVFVWIGYLSSAVNPLVYTLFNKTYRSAFSRYIQCQYKENKKPLQLILVNTIPALAYKSSQLQMGQKKNSKQDAKTTDNDCSMVALGKQHSEEASKDNSDGVNEKVSCV

SEQ ID NO: 416 - protein, 516 aa, Homo sapiens
MLGKLAMLLWVQQALLALLLPTLLAQGEARRSRNTTRPALLRLSDYLLTNYRKGVRPVRDWRKPTTVSIDVIVYAILNVDEKNQVLTTYIWYRQYWTDEFLQWNPEDFDNITKLSIPTDSIWVPDILINEFVDVGKSPNIPYVYIRHQGEVQNYKPLQVVTACSLDIYNFPFDVQNCSLTFTSWLHTIQDINISLWRLPEKVKSDRSVFMNQGEWELLGVLPYFREFSMESSNYYAEMKFYVVIRRRPLFYVVSLLLPSIFLMVMDIVGFYLPPNSGERVSFKITLLLGYSVFLIIVSDTLPATAIGTPLIGKAPPGSRAQSGEKPAPSHLLHVSLASALGCTGVYFVVCMALLVISLAETIFIVRLVHKQDLQQPVPAWLRHLVLERIAWLLCLREQSTSQRPPATSQATKTDDCSAMGNHCSHMGGPQDFEKSPRDRCSPPPPPREASLAVCGLLQELSSIRQFLEKRDEIREVARDWLRVGSVLDKLLFHIYLLAVLAYSITLVMLWSIWQYA

SEQ ID NO: 417 - protein, 447 aa, Homo sapiens
MEGGWPARQSALLCLTVSLLLQGRGDAFTINCSGFDQHGVDPAVFQAVFDRKAFRPFTNYSIPTRVNISFTLSAILGVDAQLQLLTSFLWMDLVWDNPFINWNPKECVGINKLTVLAENLWLPDIFIVESMDVDQTPSGLTAYISSEGRIKYDKPMRVTSICNLDIFYFPFDQQNCTFTFSSFLYTVDSMLLGMDKEVWEITDTSRKVIQTQGEWELLGINKATPKMSMGNNLYDQIMFYVAIRRRPSLYIINLLVPSSFLVAIDALSFYLPAESENRAPFKITLLLGYNVFLLMMNDLLPASGTPLISVYFALCLSLMVVSLLETVFITYLLHVATTQPPPMPRWLHSLLLHCTSPGRCCPTAPQKGNKGLGLTLTHLPGPKEPGELAGKKLGPRETEPDGGSGWTKTQLMELWVQFSHAMDTLLFRLYLLFMASSILTVIVLWNT

SEQ ID NO: 418 - protein, 479 aa, Homo sapiens
MMDVNSSGRPDLYGHLRSFLLPEVGRGLPDLSPDGGADPVAGSWAPHLLSEVTASPAPTWDAPPDNASGCGEQINYGRVEKVVIGSILTLITLLTIAGNCLVVISVCFVKKLRQPSNYLIVSLALADLSVAVAVMPFVSVTDLIGGKWIFGHFFCNVFIAMDVMCCTASIMTLCVISIDRYLGITRPLTYPVRQNGKCMAKMILSVWLLSASITLPPLFGWAQNVNDDKVCLISQDFGYTIYSTAVAFYIPMSVMLFMYYQIYKAARKSAAKHKFPGFPRVEPDSVIALNGIVKLQKEVEECANLSRLLKHERKNISIFKREQKAATTLGIIVGAFTVCWLPFFLLSTARPFICGTSCSCIPLWVERTFLWLGYANSLINPFIYAFFNRDLRTTYRSLLQCQYRNINRKLSAAGMHEALKLAERPERPEFVLRACTRRVLLRPEKRPPVSVWVLQSPDHHNWLADKMLTTVEKKVMIHD

SEQ ID NO: 419 - protein, 4374 aa, Homo sapiens
MKVDRTKLKKTPTEAPADCRALIDKLKVCNDEQLLLELQQIKTWNIGKCELYHWVDLLDRFDGILADAGQTVENMSWMLVCDRPEREQLKMLLLAVLNFTALLIEYSFSRHLYSSIEHLTTLLASSDMQVVLAVLNLLYVFSKRSNYITRLGSDKRTPLLTRLQHLAESWGGKENGFGLAECCRDLHMMKYPPSATTLHFEFYADPGAEVKIEKRTTSNTLHYIHIEQLDKISESPSEIMESLTKMYSIPKDKQMLLFTHIRLAHGFSNHRKRLQAVQARLHAISILVYSNALQESANSILYNGLIEELVDVLQITDKQLMEIKAASLRTLTSIVHLERTPKLSSIIDCTGTASYHGFLPVLVRNCIQAMIDPSMDPYPHQFATALFSFLYHLASYDAGGEALVSCGMMEALLKVIKFLGDEQDQITFVTRAVRVVDLITNLDMAAFQSHSGLSIFIYRLEHEVDLCRKECPFVIKPKIQRPNTTQEGEEMETDMDGVQCIPQRAALLKSMLNFLKKAIQDPAFSDGIRHVMDGSLPTSLKHIISNAEYYGPSLFLLATEVVTVFVFQEPSLLSSLQDNGLTDVMLHALLIKDVPATREVLGSLPNVFSALCLNARGLQSFVQCQPFERLFKVLLSPDYLPAMRRRRSSDPLGDTASNLGSAVDELMRHQPTLKTDATTAIIKLLEEICNLGRDPKYICQKPSIQKADGTATAPPPRSNHAAEEASSEDEEEEEVQAMQSFNSTQQNETEPNQQVVGTEERIPIPLMDYILNVMKFVESILSNNTTDDHCQEFVNQKGLLPLVTILGLPNLPIDFPTSAACQAVAGVCKSILTLSHEPKVLQEGLLQLDSILSSLEPLHRPIESPGGSVLLRELACAGNVADATLSAQATPLLHALTAAHAYIMMFVHTCRVGQSEIRSISVNQWGSQLGLSVLSKLSQLYCSLVWESTVLLSLCTPNSLPSGCEFGQADMQKLVPKDEKAGTTQGGKRSDGEQDGAAGSMDASTQGLLEGIGLDGDTLAPMETDEPTASDSKGKSKITPAMAARIKQIKPLLSASSRLGRALAELFGLLVKLCVGSPVRQRRSHHAASTTTAPTPAARSTASALTKLLTKGLSWQPPPYTPTPRFRLTFFICSVGFTSPMLFDERKYPYHLMLQKFLCSGGHNALFETFNWALSMGGKVPVSEGLEHSDLPDGTGEFLDAWLMLVEKMVNPTTVLESPHSLPAKLPGGVQNFPQFSALRFLVVTQKAAFTCIKNLWNRKPLKVYGGRMAESMLAILCHILRGEPVIRERLSKEKEGSRGEEDTGQEEGGSRREPQVNQQQLQQLMDMGFTREHAMEALLNTSTMEQATEYLLTHPPPIMGGVVRDLSMSEEDQMMRAIAMSLGQDIPMDQRAESPEEVACRKEEEERKAREKQEEEEAKCLEKFQDADPLEQDELHTFTDTMLPGCFHLLDELPDTVYRVCDLIMTAIKRNGADYRDMILKQVVNQVWEAADVLIKAALPLTTSDTKTVSEWISQMATLPQASNLATRILLLTLLFEELKLPCAWVVESSGILNVLIKLLEVVQPCLQAAKEQKEVQTPKWITPVLLLIDFYEKTAISSKRRAQMTKYLQSNSNNWRWFDDRSGRWCSYSASNNSTIDSAWKSGETSVRFTAGRRRYTVQFTTMVQVNEETGNRRPVMLTLLRVPRLNKNSKNSNGQELEKTLEESKEMDIKRKENKGNDTPLALESTNTEKETSLEETKIGEILIQGLTEDMVTVLIRACVSMLGVPVDPDTLHATLRLCLRLTRDHKYAMMFAELKSTRMILNLTQSSGFNGFTPLVTLLLRHIIEDPCTLRHTMEKVVRSAATSGAGSTTSGVVSGSLGSREINYILRVLGPAACRNPDIFTEVANCCIRIALPAPRGSGTASDDEFENLRIKGPNAVQLVKTTPLKPSPLPVIPDTIKEVIYDMLNALAAYHAPEEADKSDPKPGVMTQEVGQLLQDMGDDVYQQYRSLTRQSSDFDTQSGFSINSQVFAADGASTETSASGTSQGEASTPEESRDGKKDKEGDRASEEGKQKGKGSKPLMPTSTILRLLAELVRSYVGIATLIANYSYTVGQSELIKEDCSVLAFVLDHLLPHTQNAEDKDTPALARLFLASLAAAGSGTDAQVALVNEVKAALGRALAMAESTEKHARLQAVMCIISTIMESCPSTSSFYSSATAKTQHNGMNNIIRLFLKKGLVNDLARVPHSLDLSSPNMANTVNAALKPLETLSRIVNQPSSLFGSKSASSKNKSEQDAQGASQDSSSNQQDPGEPGEAEVQEEDHDVTQTEVADGDIMDGEAETDSVVIAGQPEVLSSQEMQVENELEDLIDELLERDGGSGNSTIIVSRSGEDESQEDVLMDEAPSNLSQASTLQANREDSMNILDPEDEEEHTQEEDSSGSNEDEDDSQDEEEEEEEDEEDDQEDDEGEEGDEDDDDDGSEMELDEDYPDMNASPLVRFERFDREDDLIIEFDNMFSSATDIPPSPGNIPTTHPLMVRHADHSSLTLGSGSSTTRLTQGIGRSQRTLRQLTANTGHTIHVHYPGNRQPNPPLILQRLLGPSAAADILQLSSSLPLQSRGRARLLVGNDDVHIIARSDDELLDDFFHDQSTATSQAGTLSSIPTALTRWTEECKVLDAESMHDCVSVVKVSIVNHLEFLRDEELEERREKRRKQLAEEETKITDKGKEDKENRDQSAQCTASKSNDSTEQNLSDGTPMPDSYPTTPSSTDAATSESKETLGTLQSSQQQPTLPTPPALGEVPQELQSPAGEGGSSTQLLMPVEPEELGPTRPSGEAETTQMELSPAPTITSLSPERAEDSDALTAVSSQLEGSPMDTSSLASCTLEEAVGDTSAAGSSEQPRAGSSTPGDAPPAVAEVQGRSDGSGESAQPPEDSSPPASSESSSTRDSAVAISGADSRGILEEPLPSTSSEEEDPLAGISLPEGVDPSFLAALPDDIRREVLQNQLGIRPPTRTAPSTNSSAPAVVGNPGVTEVSPEFLAALPPAIQEEVLAQQRAEQQRRELAQNASSDTPMDPVTFIQTLPSDLRRSVLEDMEDSVLAVMPPDIAAEAQALRREQEARQRQLMHERLFGHSSTSALSAILRSPAFTSRLSGNRGVQYTRLAVQRGGTFQMGGSSSHNRPSGSNVDTLLRLRGRLLLDHEALSCLLVLLFVDEPKLNTSRLHRVLRNLCYHAQTRHWVIRSLLSILQRSSESELCIETPKLTTSEEKGKKSSKSCGSSSHENRPLDLLHKMESKSSNQLSWLSVSMDAALGCRTNIFQIQRSGGRKHTEKHASGGSTVHIHPQAAPVVCRHVLDTLIQLAKVFPSHFTQQRTKETNCESDRERGNKACSPCSSQSSSSGICTDFWDLLVKLDNMNVSRKGKNSVKSVPVSAGGEGETSPYSLEASPLGQLMNMLSHPVIRRSSLLTEKLLRLLSLISIALPENKVSEAQANSGSGASSTTTATSTTSTTTTTAASTTPTPPTAPTPVTSAPALVAATAISTIVVAASTTVTTPTTATTTVSISPTTKGSKSPAKVSDGGSSSTDFKMVSSGLTENQLQLSVEVLTSHSCSEEGLEDAANVLLQLSRGDSGTRDTVLKLLLNGARHLGYTLCKQIGTLLAELREYNLEQQRRAQCETLSPDGLPEEQPQTTKLKGKMQSRFDMAENVVIVASQKRPLGGRELQLPSMSMLTSKTSTQKFFLRVLQVIIQLRDDTRRANKKAKQTGRLGSSGLGSASSIQAAVRQLEAEADAIIQMVREGQRARRQQQAATSESSQSEASVRREESPMDVDQPSPSAQDTQSIASDGTPQGEKEKEERPPELPLLSEQLSLDELWDMLGECLKELEESHDQHAVLVLQPAVEAFFLVHATERESKPPVRDTRESQLAHIKDEPPPLSPAPLTPATPSSLDPFFSREPSSMHISSSLPPDTQKFLRFAETHRTVLNQILRQSTTHLADGPFAVLVDYIRVLDFDVKRKYFRQELERLDEGLRKEDMAVHVRRDHVFEDSYRELHRKSPEEMKNRLYIVFEGEEGQDAGGLLREWYMIISREMFNPMYALFRTSPGDRVTYTINPSSHCNPNHLSYFKFVGRIVAKAVYDNRLLECYFTRSFYKHILGKSVRYTDMESEDYHFYQGLVYLLENDVSTLGYDLTFSTEVQEFGVCEVRDLKPNGANILVTEENKKEYVHLVCQMRMTGAIRKQLAAFLEGFYEIIPKRLISIFTEQELELLISGLPTIDIDDLKSNTEYHKYQSNSIQIQWFWRALRSFDQADRAKFLQFVTGTSKVPLQGFAALEGMNGIQKFQIHRDDRSTDRLPSAHTCFNQLDLPAYESFEKLRHMLLLAIQECSEGFGLA

SEQ ID NO: 420 - protein, 5121 aa, Homo sapiens
MTSRRLEESMGAVQMGLVNMFKGFQSKVLPPLSPKVVTEEEVNRMLTPSEFLKEMSLTTEQRLAKTRLMCRPQIIELLDMGETTHQKFSGIDLDQALFQPFPSEIIFQNYTPCEVYEVPLILRNNDKIPRLVKVVEESSPYFKVISPKDIGHKVAPGVPSIFRILFTPEENKDYAHTLTCVTEREKFIVPIKARGARAILDFPDKLNFSTCPVKYSTQKILLVRNIGNKNAVFHIKTCRPFSIEPAIGTLNVGESMQLEVEFEPQSVGDHSGRLIVCYDTGEKVFVSLYGAAIDMNIRLDKNSLTIEKTYISLANQRTITIHNRSNIIAHFLWKVFATQQEEDREKYRACDDLIKEEKDETDEFFEECITDPLLREHLSVLSRTFANQRRLVQGDSKLFFNNVFTVEPLEGDVWPNSSAEITVYFNPLEAKLYQQTIYCDILGREIRLPLRIKGEGMGPKIHFNFELLDIGKVFTGSAHCYEAILYNKGSIDALFNMTPPTSALGACFVFSPKEGIIEPSGVQAIQISFSSTILGNFEEEFLVNVNGSPEPVKLTIRGCVIGPTFHFNVPALHFGDVSFGFPHTLICSLNNTSLIPMTYKLRIPGDGLGHKSISYCEQHVDYKRPSWTKEEISSMKPKEFTISPDCGTIRPQGFAAIRVTLCSNTVQKYELALVVDVEGIGEEVLALLITARCVVPALHLVNTEVDFGHCFLKYPYEKTLQLANQDDLPGFYEVQPQVCEEVPTVLFSSPTPSGVISPSSTIHIPLVLETQVTGEHRSTVYISIFGSQDPPLVCHLKSAGEGPVIYVHPNQVDFGNIYVLKDSSRILNLCNQSFIPAFFQAHMAHKKSLWTIEPNEGMVPPETDVQLALTANLNDTLTFKDCVILDIENSSTYRIPVQASGTGSTIVSDKPFAPELNLGAHFSLDTHYYHFKLINKGRRIQQLFWMNDSFRPQAKLSKKGRVKKGHAHVQPQPSGSQEPRDPQSPVFHLHPASMELYPGQAIDVILEGYSATPRIVKEKLVCHAIIGAQKGKSLVMAVNITCEFVAPLIQLSTKQLIYRLEKKPNSILKPDYQPLAIKNISTLPVNLLLSTSGPFFICETDKSLLPATPEPIKLEIDEEKNLLIKFDPSYRNDLNNWVAEEILAIKYVEHPQIDSLDLRGEVHYPNLSFETKELDFGCILNDTELIRYVTITNCSPLVVKFRWFFLVNDEENQIRFVTLPKKPYSAPVSQMESIPATSEAASPPAILVTVESPEMDLNDFVKTVLVDEDARPEEKELRKTKASSVISDEIKISSTEIERIYSSQSQVEDQESLQTCEQNEMLSIGIEEVFDILPLFGVLQPHSSHQISFTFYGHANIIAQAKALCEVEEGPTYEITLKGEASLVNYSFDTKDIHYGLQLFDHVTEREITLTNMGKVGFEFKVLTDHQSSPDNLLPGVPLILPVSGFISSHQEQVLKVYYLPGVPEVFKRSFQIQIAHLDPENITLSGEGIFPQICLDLPRNLTANEKYEMFLNQARKNTDKEYNKCEMLDHFDIITEEVPEDEPAEVSAHLQMEVERLIVQSYVLEHQKTTTPDPMDDPCFSHRSRRKLAKIQLPEYILDFGYIILGEVRTHIIKIINTSHFPVSFHADKRVLHETGFSTELDRVKNLPHCETEIFEVRFDPQGANLPVGSKEVILPIKVVGGPTVHICLQAKVTIPTMTLSRGKVDFATIQCGQCLVETIQLSNHLQVPCEWFVQSQKPVDKLEKHMPKYLRQKLRAELKPKTRIFEIQPISGVLDPGEKSNVQVKFMPKEEKFYSQTLVFQIAQSAQKLTLLARGQGLEPRLEFSPSVLDLGPLLLCAPGDEAEVIVKNPCNFPIEFYSLEFDQQYLIEEKILRKLKGYDSYNTLLLPPRNPGEKLPPELYEYFKEIKKSKEEQMRAKYLENLAQENEEEDITSSDQGTSNSTKRTSLSRGISVTSNLEEWHALLVESKTYLEEEEDEESLEKIIFQTDKLQSIDSHSMEEVGEVENNPVSKAIARHLGIDISAEGRLAKNRKGIAIIIHGTPLSGKSANAVSVAKYYNAACLSIDSIVLEAVANSNNIPGIRARELCIRAAIEQSVKEGEEAAQEAAVGQNVIGQGRLSTDTLGKLASEMTLVAPEIKPGKSVRGSVVITKSKADSHGSGSQKQHHSHQSETPQISSSPLPPGPIHRWLSVSPSVGGETGLMSCVLPDELLVQILAERIQLSDCYRGVVFDGLDTLFAQNAAAALLCLLKAIGSREHIYILNMAQDYAAMKAQEKAKKEQEERKHKGALEKEKERLQNMDEEEYDALTEEEKLTFDRGIQQALRERKKREQERLAKEMQEKKLQQELERQKEEDELKRRVKKGKQGPIKEEPPMKKSQAANKQVPPLTKVDVKMETIERKISVREQTMSEKEELNKKKRNMGDVSMHGLPLVQDQEDSEGDNSKDPDKQLAPKFKTYELTLKDVQNILMYWDRKQGVQLPPAGMEEAPHEPDDQRQVPLGGRRGRKDRERERLEKERTEKERLEREKAERERLEKLRALEERSDWEGEGEEDHEGKKEKDLGVPFLDIQTPDFEGLSWKQALESDKLPKGEQILDILGLGASGPPIPPPALFSIVSYPVKRPPLTMTDDLEHFVFVIPPSEDISLDEKKEMEIESDFLATTNTTKAQEEQTSSSKGGKQKMKEKIDQVFEIQKDKRHMALNRKVLSGEPAGTISQLSDTDLDNFNGQHSQEKFTRLNHFRWIVPANGEVTLQVHFSSDEFGNFDQTFNFEILGTCCQYQLYCRGICTYPYICQDPKVVFPQRKMDMKTNEVIFKKYVMSTETYYFGPLLCGKSRDKYKSSLFPGNMETLTILNTSLMVVEASFYFQNDVKANTYFLEPNTMVLKPNEKQILNVWAYPTSVGVFEDSIVCCINDNPEPAIFQLSCQGIRPELELEPRQLHFDRLLLHRQESRVVLLRNVTLLPVAWRITSLEHLGDDFTVSLMQGTIPPEAEYGLHLYFQPTKPVNIKKAIRLEVLDAENLLGVVQIENIMVFAEAYDIALDITFPKGAEGGLDFGIVRVTEEAKQPLQLKNRGKYEIAFSFSVDSVGISTPNINSMISVQPKKGSLTPTEKPTNVQVFFHAKKEVKIEHQPVLRCQIIEPNISEGGEIIASIPIKFSANAVYSKYNITPSSVINFGALICGTRKSTTFTIENQGVTDFKFALYKLTGESPIHQKKAASHVRHARSRESESFYKTGSSRAAKFSDTIQKEVTTTGQARFAHGMFTVYPGFGSIPSGGQQVINVDCVADAMGKCEEFIAIDISGRDPAVHPAGILYTLLAEACLPAFVTENNALIFEEHQICTSANLHHILQTIESGGLFVEDENKFIFCNVLVGRQAKARFKISNVGKITCDVNIVVRPISNKPFARIVDIFEVEPSKMCIASHSHAFATVSFTPQIMQNYQCIFEATLDGLPSTLAKSRGLVFDIAGEGNLPRVTVVRPVLHNQYGNPLLLFKRLLLGHSEKLPLILKNNGVLPAQLHVDLQDELGVFSLKGRPTTAYIYITEENKPHVKAKKAHTASLVVSPGDTAEFDVVFHSQKVGRMRGIIHLSVINNQYEETSIHMVGEGYEDDITLDNIHGLVAPTSQEDISISEFTEIIEDNDMEDLVAAALVDHIQFGDCHIGHSYNASFTVTNHSQVNLIRFEWPVSATIAFSPQMGHLHPGCAKDIVVTMKSDVPINLKNMRIRCKLSRIMFQLPADQVPDWDDRMHTVKWVDVPRNMPGTFTTKRKVIETDPEPAHSVLEENYQELQLQISANVDFASYHCQARDVRFKETLVYQTRVFEFDVINSGRVQLEFSWVSEDTSKAVSFAKPDHQGSAQKDQLSQGTMHTGSTLDSTMDHWAEGSPQPFSVEPSSGIVPVGKIQKFKVKFSPLDIGDFESNLFCQIPNLPPGEQGPVLVAKGRSTLPICHFDLKDSDYISGHQRNPELRGSSGGALDPNTRVIEFTTVGIGGKNLRTFTILNPTNSTYSFCWISEEIESLQNPAAFTCLTEKGFIHPEKKAEIVFQFTPFHLGITESSWTFLIPEHNITVPFLLVGKTTEPLISLNKSHLNFSSLLIGREARETVQIINKEEQGFDFSFQDNSRYSEGFSNSLLVCPMEGWIPPLSRFPIDIFFTPKQEGDVNFNLICNVEKKVHPVTLNVKAEGYTMNVEIKCKDRTGSITLLTPNQTNIINFYEVELNECVQCEFNFINTGKFTFSFQAQLCGSKTLLQYLEFSPIDSTVDVGQSVHATLSFQPLKKCVLTDLELIIKISHGPTFMCNISGCAVSPAIHFSFTSYNFGTCFIYQAGMPPYKQTLVITNKEETPMSIDCLYTNTTHLEVNSRVDVVKPGNTLEIPITFYPRESINYQELIPFEINGLSQQTVEIKGKGTKMKILVLDPANRIVKLGAVLPGQVVKRTVSIMNNSLAQLTFNQSILFTIPELQEPKVLTLAPFHNITLKPKEVCKLEVIFAPKKRVPPFSEEVFMECMGLLRPLFLLSGCCQALEISLDQEHIPFGPVVYQTQATRRILMMNTGDVGARFKWDIKKFEPHFSISPEEGYITSGMEVSFEVTYHPTEVGKESLCKNILCYIQGGSPLSLTLSGVCVGPPAVKEVVNFTCQVRSKHTQTILLSNRTNQTWNLHPIFEGEHWEGPEFITLEAHQQNKPYEITYRPRTMNLENRKHQGTLFFPLPDGTGWLYALHGTSELPKAVANIYREVPCKTPYTELLPITNWLNKPQRFRVIVEILKPEKPDLSITMKGLDYIDVLSGSKKDYKLNFFSHKEGTYAAKVIFRNEVTNEFLYYNVSFRVIPSGIIKTIEMVTPVRQVASASIKLENPLPYSVTFSTECRMPDIALPSQFVVPANSEGTFSFEFQPLKAGETFGRLTLHNTDLGYYQYELYLKATPALPEKPVHFQTVLGSSQIILVKFINYTRQRTEYYCRTDCTDFHAEKLINAAPGGQGGTEASVEVLFEPSHLGETKGILILSSLAGGEYIIPLFGMALPPKPQGPFSIRAGYSIIIPFKNVFYHMVTFSIIVDNPAFTIRAGESVRPKKINNITVSFEGNPSGSKTPITTKLTVSCPPGEGSETGVKWVYYLKGITL

SEQ ID NO: 421 - skipped

SEQ ID NO: 422 - protein, 483 aa, Homo sapiens
MSGHKCSYPWDLQDRYAQDKSVVNKMQQKYWETKQAFIKATGKKEDEHVVASDADLDAKLELFHSIQRTCLDLSKAIVLYQKRICFLSQEENELGKFLRSQGFQDKTRAGKMMQATGKALCFSSQQRLALRNPLCRFHQEVETFRHRAISDTWLTVNRMEQCRTEYRGALLWMKDVSQELDPDLYKQMEKFRKVQTQVRLAKKNFDKLKMDVCQKVDLLGASRCNLLSHMLATYQTTLLHFWEKTSHTMAAIHESFKGYQPYEFTTLKSLQDPMKKLVEKEEKKKINQQESTDAAVQEPSQLISLEEENQRKESSSFKTEDGKSILSALDKGSTHTACSGPIDELLDMKSEEGACLGPVAGTPEPEGADKDDLLLLSEIFNASSLEEGEFSKEWAAVFGDGQVKEPVPTMALGEPDPKAQTGSGFLPSQLLDQNMKDLQASLQEPAKAASDLTAWFSLFADLDPLSNPDAVGKTDKEHELLNA

SEQ ID NO: 423 - protein, 166 aa, Homo sapiens
MKYTSYILAFQLCIVLGSLGCYCQDPYVKEAENLKKYFNAGHSDVADNGTLFLGILKNWKEESDRKIMQSQIVSFYFKLFKNFKDDQSIQKSVETIKEDMNVKFFNSNKKKRDDFEKLTNYSVTDLNVQRKAIHELIQVMAELSPAAKTGKRKRSQMLFRGRRASQ

SEQ ID NO: 424 - protein, 489 aa, Homo sapiens
MALLFLLPLVMQGVSRAEMGTADLGPSSVPTPTNVTIESYNMNPIVYWEYQIMPQVPVFTVEVKNYGVKNSEWIDACINISHHYCNISDHVGDPSNSLWVRVKARVGQKESAYAKSEEFAVCRDGKIGPPKLDIRKEEKQIMIDIFHPSVFVNGDEQEVDYDPETTCYIRVYNVYVRMNGSEIQYKILTQKEDDCDEIQCQLAIPVSSLNSQYCVSAEGVLHVWGVTTEKSKEVCITIFNSSIKGSLWIPVVAALLLFLVLSLVFICFYIKKINPLKEKSIILPKSLISVVRSATLETKPESKYVSLITSYQPFSLEKEVVCEEPLSPATVPGMHTEDNPGKVEHTEELSSITEVVTTEENIPDVVPGSHLTPIERESSSPLSSNQSEPGSIALNSYHSRNCSESDHSRNGFDTDSSCLESHSSLSDSEFPPNNKGEIKTEGQELITVIKAPTSFGYDKPHVLVDLLVDDSGKESLIGYRPTEDSKEFS

SEQ ID NO: 425 - protein, 1332 aa, Homo sapiens
MESHSRAGKSRKSAKFRSISRSLMLCNAKTSDDGSSPDEKYPDPFEISLAQGKEGIFHSSVQLADTSEAGPSSVPDLALASEAAQLQAAGNDRGKTCRRIFFMKESSTASSREKPGKLEAQSSNFLFPKACHQRARSNSTSVNPYCTREIDFPMTKKSAAPTDRQPYSLCSNRKSLSQQLDCPAGKAAGTSRPTRSLSTAQLVQPSGGLQASVISNIVLMKGQAKGLGFSIVGGKDSIYGPIGIYVKTIFAGGAAAADGRLQEGDEILELNGESMAGLTHQDALQKFKQAKKGLLTLTVRTRLTAPPSLCSHLSPPLCRSLSSSTCITKDSSSFALESPSAPISTAKPNYRIMVEVSLQKEAGVGLGIGLCSVPYFQCISGIFVHTLSPGSVAHLDGRLRCGDEIVEISDSPVHCLTLNEVYTILSHCDPGPVPIIVSRHPDPQVSEQQLKEAVAQAVENTKFGKERHQWSLEGVKRLESSWHGRPTLEKEREKNSAPPHRRAQKVMIRSSSDSSYMSGSPGGSPGSGSAEKPSSDVDISTHSPSLPLAREPVVLSIASSRLPQESPPLPESRDSHPPLRLKKSFEILVRKPMSSKPKPPPRKYFKSDSDPQKSLEERENSSCSSGHTPPTCGQEARELLPLLLPQEDTAGRSPSASAGCPGPGIGPQTKSSTEGEPGWRRASPVTQTSPIKHPLLKRQARMDYSFDTTAEDPWVRISDCIKNLFSPIMSENHGHMPLQPNASLNEEEGTQGHPDGTPPKLDTANGTPKVYKSADSSTVKKGPPVAPKPAWFRQSLKGLRNRASDPRGLPDPALSTQPAPASREHLGSHIRASSSSSSIRQRISSFETFGSSQLPDKGAQRLSLQPSSGEAAKPLGKHEEGRFSGLLGRGAAPTLVPQQPEQVLSSGSPAASEARDPGVSESPPPGRQPNQKTLPPGPDPLLRLLSTQAEESQGPVLKMPSQRARSFPLTRSQSCETKLLDEKTSKLYSISSQVSSAVMKSLLCLPSSISCAQTPCIPKEGASPTSSSNEDSAANGSAETSALDTGFSLNLSELREYTEGLTEAKEDDDGDHSSLQSGQSVISLLSSEELKKLIEEVKVLDEATLKQLDGIHVTILHKEEGAGLGFSLAGGADLENKVITVHRVFPNGLASQEGTIQKGNEVLSINGKSLKGTTHHDALAILRQAREPRQAVIVTRKLTPEAMPDLNSSTDSAASASAASDVSVESTAEATVCTVTLEKMSAGLGFSLEGGKGSLHGDKPLTINRIFKGAASEQSETVQPGDEILQLGGTAMQGLTRFEAWNIIKALPDGPVTIVIRRKSLQSKETTAAGDS

SEQ ID NO: 426 - protein, 155 aa, Homo sapiens
MTPGKTSLVSLLLLLSLEAIVKAGITIPRNPGCPNSEDKNFPRTVMVNLNIHNRNTNTNPKRSSDYYNRSTSPWNLHRNEDPERYPSVIWEAKCRHLGCINADGNVDYHMNSVPIQQEILVLRREPPHCPNSFRLEKILVSVGCTCVTPIVHHVA

SEQ ID NO: 427 - protein, 398 aa, Homo sapiens
MLRLYVLVMGVSAFTLQPAAHTGAARSCRFRGRHYKREFRLEGEPVALRCPQVPYWLWASVSPRINLTWHKNDSARTVPGEEETRMWAQDGALWLLPALQEDSGTYVCTTRNASYCDKMSIELRVFENTDAFLPFISYPQILTLSTSGVLVCPDLSEFTRDKTDVKIQWYKDSLLLDKDNEKFLSVRGTTHLLVHDVALEDAGYYRCVLTFAHEGQQYNITRSIELRIKKKKEETIPVIISPLKTISASLGSRLTIPCKVFLGTGTPLTTMLWWTANDTHIESAYPGGRVTEGPRQEYSENNENYIEVPLIFDPVTREDLHMDFKCVVHNTLSFQTLRTTVKEASSTFSWGIVLAPLSLAFLVLGGIWMHRRCKHRTGKADGLTVLWPHHQDFQSYPK

SEQ ID NO: 428 - protein, 696 aa, Homo sapiens
MKAPIPHLILLYATFTQSLKVVTKRGSADGCTDWSIDIKKYQVLVGEPVRIKCALFYGYIRTNYSLAQSAGLSLMWYKSSGPGDFEEPIAFDGSRMSKEEDSIWFRPTLLQDSGLYACVIRNSTYCMKVSISLTVGENDTGLCYNSKMKYFEKAELSKSKEISCRDIEDFLLPTREPEILWYKECRTKTWRPSIVFKRDTLLIREVREDDIGNYTCELKYGGFVVRRTTELTVTAPLTDKPPKLLYPMESKLTIQETQLGDSANLTCRAFFGYSGDVSPLIYWMKGEKFIEDLDENRVWESDIRILKEHLGEQEVSISLIVDSVEEGDLGNYSCYVENGNGRRHASVLLHKRELMYTVELAGGLGAILLLLVCLVTIYKCYKIEIMLFYRNHFGAEELDGDNKDYDAYLSYTKVDPDQWNQETGEEERFALEILPDMLEKHYGYKLFIPDRDLIPTGTYIEDVARCVDQSKRLIIVMTPNYVVRRGWSIFELETRLRNMLVTGEIKVILIECSELRGIMNYQEVEALKHTIKLLTVIKWHGPKCNKLNSKFWKRLQYEMPFKRIEPITHEQALDVSEQGPFGELQTVSAISMAAATSTALATAHPDLRSTFHNTYHSQMRQKHYYRSYEYDVPPTGTLPLTSIGNQHTYCNIPMTLINGQRPQTKSSREQNPDEAHTNSAILPLLPRETSISSVIW

SEQ ID NO: 429 - protein, 686 aa, Homo sapiens
MKPPFLLALVVCSVVSTNLKMVSKRNSVDGCIDWSVDLKTYMALAGEPVRVKCALFYSYIRTNYSTAQSTGLRLMWYKNKGDLEEPIIFSEVRMSKEEDSIWFHSAEAQDSGFYTCVLRNSTYCMKVSMSLTVAENESGLCYNSRIRYLEKSEVTKRKEISCPDMDDFKKSDQEPDVVWYKECKPKMWRSIIIQKGNALLIQEVQEEDGGNYTCELKYEGKLVRRTTELKVTALLTDKPPKPLFPMENQPSVIDVQLGKPLNIPCKAFFGFSGESGPMIYWMKGEKFIEELAGHIREGEIRLLKEHLGEKEVELALIFDSVVEADLANYTCHVENRNGRKHASVLLRKKDLIYKIELAGGLGAIFLLLVLLVVIYKCYNIELMLFYRQHFGADETNDDNKEYDAYLSYTKVDQDTLDCDNPEEEQFALEVLPDVLEKHYGYKLFIPERDLIPSGTYMEDLTRYVEQSRRLIIVLTPDYILRRGWSIFELESRLHNMLVSGEIKVILIECTELKGKVNCQEVESLKRSIKLLSLIKWKGSKSSKLNSKFWKHLVYEMPIKKKEMLPRCHVLDSAEQGLFGELQPIPSIAMTSTSATLVSSQADLPEFHPSDSMQIRHCCRGYKHEIPATTLPVPSLGNHHTYCNLPLTLLNGQLPLNNTLKDTQEFHRNSSLLPLSSKELSFTSDIW

SEQ ID NO: 430 - protein, 212 aa, Homo sapiens
MNSFSTSAFGPVAFSLGLLLVLPAAFPAPVPPGEDSKDVAAPHRQPLTSSERIDKQIRYILDGISALRKETCNKSNMCESSKEALAENNLNLPKMAEKDGCFQSGFNEETCLVKIITGLLEFEVYLEYLQNRFESSEEQARAVQMSTKVLIQFLQKKAKNLDAITTPDPTTNASLLTKLQAQNQWLQDMTTHLILRSFKEFLQSSLRALRQM

SEQ ID NO: 431 - protein, 390 aa, Homo sapiens
MRGDRGRGRGGRFGSRGGPGGGFRPFVPHIPFDFYLCEMAFPRVKPAPDETSFSEALLKRNQDLAPNSAEQASILSLVTKINNVIDNLIVAPGTFEVQIEEVRQVGSYKKGTMTTGHNVADLVVILKILPTLEAVAALGNKVVESLRAQDPSEVLTMLTNETGFEISSSDATVKILITTVPPNLRKLDPELHLDIKVLQSALAAIRHARWFEENASQSTVKVLIRLLKDLRIRFPGFEPLTPWILDLLGHYAVMNNPTRQPLALNVAYRRCLQILAAGLFLPGSVGITDPCESGNFRVHTVMTLEQQDMVCYTAQTLVRILSHGGFRKILGQEGDASYLASEISTWDGVIVTPSEKAYEKPPEKKEGEEEEENTEEPPQGEEEESMETQE

SEQ ID NO: 432 - protein, 175 aa, Homo sapiens
MAQSQGWVKRYIKAFCKGFFVAVPVAVTFLDRVACVARVEGASMQPSLNPGGSQSSDVVLLNHWKVRNFEVHRGDIVSLVSPKNPEQKIIKRVIALEGDIVRTIGHKNRYVKVPRGHIWVEGDHHGHSFDSNSFGPVSLGLLHAHATHILWPPERWQKLESVLPPERLPVQREEE

SEQ ID NO: 433 - protein, 1801 aa, Homo sapiens
MPENPATDKLQVLQVLDRLKMKLQEKGDTSQNEKLSMFYETLKSPLFNQILTLQQSIKQLKGQLNHIPSDCSANFDFSRKGLLVFTDGSITNGNVHRPSNNSTVSGLFPWTPKLGNEDFNSVIQQMAQGRQIEYIDIERPSTGGLGFSVVALRSQNLGKVDIFVKDVQPGSVADRDQRLKENDQILAINHTPLDQNISHQQAIALLQQTTGSLRLIVAREPVHTKSSTSSSLNDTTLPETVCWGHVEEVELINDGSGLGFGIVGGKTSGVVVRTIVPGGLADRDGRLQTGDHILKIGGTNVQGMTSEQVAQVLRNCGNSVRMLVARDPAGDISVTPPAPAALPVALPTVASKGPGSDSSLFETYNVELVRKDGQSLGIRIVGYVGTSHTGEASGIYVKSIIPGSAAYHNGHIQVNDKIVAVDGVNIQGFANHDVVEVLRNAGQVVHLTLVRRKTSSSTSPLEPPSDRGTVVEPLKPPALFLTGAVETETNVDGEDEEIKERIDTLKNDNIQALEKLEKVPDSPENELKSRWENLLGPDYEVMVATLDTQIADDAELQKYSKLLPIHTLRLGVEVDSFDGHHYISSIVSGGPVDTLGLLQPEDELLEVNGMQLYGKSRREAVSFLKEVPPPFTLVCCRRLFDDEASVDEPRRTETSLPETEVDHNMDVNTEEDDDGELALWSPEVKIVELVKDCKGLGFSILDYQDPLDPTRSVIVIRSLVADGVAERSGGLLPGDRLVSVNEYCLDNTSLAEAVEILKAVPPGLVHLGICKPLVEDNEEESCYILHSSSNEDKTEFSGTIHDINSSLILEAPKGFRDEPYFKEELVDEPFLDLGKSFHSQQKEIEQSKEAWEMHEFLTPRLQEMDEEREMLVDEEYELYQDPSPSMELYPLSHIQEATPVPSVNELHFGTQWLHDNEPSESQEARTGRTVYSQEAQPYGYCPENVMKENFVMESLPSVPSTEGNSQQGRFDDLENLNSLAKTSLDLGMIPNDVQGPSLLIDLPVVAQRREQEDLPLYQHQATRVISKASAYTGMLSSRYATDTCELPEREEGEGEETPNFSHWGPPRIVEIFREPNVSLGISIVGGQTVIKRLKNGEELKGIFIKQVLEDSPAGKTNALKTGDKILEVSGVDLQNASHSEAVEAIKNAGNPVVFIVQSLSSTPRVIPNVHNKANKITGNQNQDTQEKKEKRQGTAPPPMKLPPPYKALTDDSDENEEEDAFTDQKIRQRYADLPGELHIIELEKDKNGLGLSLAGNKDRSRMSIFVVGINPEGPAAADGRMRIGDELLEINNQILYGRSHQNASAIIKTAPSKVKLVFIRNEDAVNQMAVTPFPVPSSSPSSIEDQSGTEPISSEEDGSVEVGIKQLPESESFKLAVSQMKQQKYPTKVSFSSQEIPLAPASSYHSTDADFTGYGGFQAPLSVDPATCPIVPGQEMIIEISKGRSGLGLSIVGGKDTPLNAIVIHEVYEEGAAARDGRLWAGDQILEVNGVDLRNSSHEEAITALRQTPQKVRLVVYRDEAHYRDEENLEIFPVDLQKKAGRGLGLSIVGKRNGSGVFISDIVKGGAADLDGRLIQGDQILSVNGEDMRNASQETVATILKCAQGLVQLEIGRLRAGSWTSARTTSQNSQGSQQSAHSSCHPSFAPVITGLQNLVGTKRVSDPSQKNSGTDMEPRTVEINRELSDALGISIAGGRGSPLGDIPVFIAMIQASGVAARTQKLKVGDRIVSINGQPLDGLSHADVVNLLKNAYGRIILQVVADTNISAIAAQLENMSTGYHLGSPTAEHHPEDTEEQLQMTAD

SEQ ID NO: 434 - protein, 399 aa, Homo sapiens
MSDILRELLCVSEKAANIARACRQQEALFQLLIEEKKEGEKNKKFAVDFKTLADVLVQEVIKQNMENKFPGLEKNIFGEESNEFTNDWGEKITLRLCSTEEETAELLSKVLNGNKVASEALARVVHQDVAFTDPTLDSTEINVPQDILGIWVDPIDSTYQYIKGSADIKSNQGIFPCGLQCVTILIGVYDIQTGVPLMGVINQPFVSRDPNTLRWKGQCYWGLSYMGTNMHSLQLTISRRNGSETHTGNTGSEAAFSPSFSAVISTSEKETIKAALSRVCGDRIFGAAGAGYKSLCVVQGLVDIYIFSEDTTFKWDSCAAHAILRAMGGGIVDLKECLERNPETGLDLPQLVYHVENEGAAGVDRWANKGGLIAYRSRKRLETFLSLLVQNLAPAETHT

SEQ ID NO: 435 - protein, 887 aa, Homo sapiens
MPILLFLIDTSASMNQRSHLGTTYLDTAKGAVETFMKLRARDPASRGDRYMLVTFEEPPYAIKAGWKENHATFMNELKNLQAEGLTTLGQSLRTAFDLLNLNRLVTGIDNYGQGRNPFFLEPAIIITITDGSKLTTTSGVQDELHLPLNSPLPGSELTKEPFRWDQRLFALVLRLPGTMSVESEQLTGVPLDDSAITPMCEVTGGRSYSVCSPRMLNQCLESLVQKVQSGVVINFEKAGPDPSPVEDGQPDISRPFGSQPWHSCHKLIYVRPNPKTGVPIGHWPVPESFWPDQNSPTLPPRTSHPVVKFSCTDCEPMVIDKLPFDKYELEPSPLTQFILERKSPQTCWQVYVSNSAKYSELGHPFGYLKASTALNCVNLFVMPYNYPVLLPLLDDLFKVHKAKPTLKWRQSFESYLKTMPPYYLGPLKKAVRMMGAPNLIADSMEYGLSYSVISYLKKLSQQAKIESDRVIGSVGKKVVQETGIKVRSRSHGLSMAYRKDFQQLLQGISEDVPHRLLDLNMKEYTGFQVALLNKDLKPQTFRNAYDIPRRNLLDHLTRMRSNLLKSTRRFLKGQDEDQVHSVPIAQMGNYQEYLKQVPSPLRELDPDQPRRLHTFGNPFKLDKKGMMIDEADEFVAGPQNKHKRPGEPNMQGIPKRRRCMSPLLRGRQQNPVVNNHIGGKGPPAPTTQAQPDLIKPLPLHKISETTNDSIIHDVVENHVADQLSSDITPNAMDTEFSASSPASLLERPTNHMEALGHDHLGTNDLTVGGFLENHEEPRDKEQCAEENIPASSLNKGKKLMHCRSHEEVNTELKAQIMKEIRKPGRKYERIFTLLKHVQGSLQTRLIFLQNVIKEASRFKKRMLIEQLENFLDEIHRRANQINHINSN

SEQ ID NO: 436 - protein, 1631 aa, Homo sapiens
MERRAAGPGWAAYERLTAEEMDEQRRQNVAYQYLCRLEEAKRWMEACLKEELPSPVELEESLRNGVLLAKLGHCFAPSVVPLKKIYDVEQLRYQATGLHFRHTDNINFWLSAIAHIGLPSTFFPETTDIYDKKNMPRVVYCIHALSLFLFRLGLAPQIHDLYGKVKFTAEELSNMASELAKYGLQLPAFSKIGGILANELSVDEAAVHAAVLAINEAVERGVVEDTLAALQNPSALLENLREPLAAVYQEMLAQAKMEKAANARNHDDRESQDIYDHYLTQAEIQGNINHVNVHGALEVVDDALERQSPEALLKALQDPALALRGVRRDFADWYLEQLNSDREQKAQELGLVELLEKEEVQAGVAAANTKGDQEQAMLHAVQRINKAIRRGVAADTVKELMCPEAQLPPVYPVASSMYQLELAVLQQQQGELGQEELFVAVEMLSAVVLINRALEARDASGFWSSLVNPATGLAEVEGENAQRYFDALLKLRQERGMGEDFLSWNDLQATVSQVNAQTQEETDRVLAVSLINEALDKGSPEKTLSALLLPAAGLDDVSLPVAPRYHLLLVAAKRQKAQVTGDPGAVLWLEEIRQGVVRANQDTNTAQRMALGVAAINQAIKEGKAAQTERVLRNPAVALRGVVPDCANGYQRALESAMAKKQRPADTAFWVQHDMKDGTAYYFHLQTFQGIWEQPPGCPLNTSHLTREEIQSAVTKVTAAYDRQQLWKANVGFVIQLQARLRGFLVRQKFAEHSHFLRTWLPAVIKIQAHWRGYRQRKIYLEWLQYFKANLDAIIKIQAWARMWAARRQYLRRLHYFQKNVNSIVKIQAFFRARKAQDDYRILVHAPHPPLSVVRRFAHLLNQSQQDFLAEAELLKLQEEVVRKIRSNQQLEQDLNIMDIKIGLLVKNRITLQEVVSHCKKLTKRNKEQLSDMMVLDKQKGLKSLSKEKRQKLEAYQHLFYLLQTQPIYLAKLIFQMPQNKTTKFMEAVIFSLYNYASSRREAYLLLQLFKTALQEEIKSKVEQPQDVVTGNPTVVRLVVRFYRNGRGQSALQEILGKVIQDVLEDKVLSVHTDPVHLYKNWINQTEAQTGQRSHLPYDVTPEQALSHPEVQRRLDIALRNLLAMTDKFLLAITSSVDQIPYGMRYVAKVLKATLAEKFPDATDSEVYKVVGNLLYYRFLNPAVVAPDAFDIVAMAAGGALAAPQRHALGAVAQLLQHAAAGKAFSGQSQHLRVLNDYLEETHLKFRKFIHRACQVPEPEERFAVDEYSDMVAVAKPMVYITVGELVNTHRLLLEHQDCIAPDHQDPLHELLEDLGELPTIPDLIGESIAADGHTDLSKLEVSLTLTNKFEGLEADADDSNTRSLLLSTKQLLADIIQFHPGDTLKEILSLSASREQEAAHKQLMSRRQACTAQTPEPLRRHRSLTAHSLLPLAEKQRRVLRNLRRLEALGLVSARNGYQGLVDELAKDIRNQHRHRHRRKAELVKLQATLQGLSTKTTFYEEQGDYYSQYIRACLDHLAPDSKSSGKGKKQPSLHYTAAQLLEKGVLVEIEDLPASHFRNVIFDITPGDEAGKFEVNAKFLGVDMERFQLHYQDLLQLQYEGVAVMKLFNKAKVNVNLLIFLLNKKFLRK

SEQ ID NO: 437 - protein, 1488 aa, Homo sapiens
MEAGSGPPGGPGSESPNRAVEYLLELNNIIESQQQLLETQRRRIEELEGQLDQLTQENRDLREESQLHRGELHRDPHGARDSPGRESQYQNLRETQFHHRELRESQFHQAARDVGYPNREGAYQNREAVYRDKERDASYPLQDTTGYTARERDVAQCHLHHENPALGRERGGREAGPAHPGREKEAGYSAAVGVGPRPPRERGQLSRGASRSSSPGAGGGHSTSTSTSPATTLQRKSDGENSRTVSVEGDAPGSDLSTAVDSPGSQPPYRLSQLPPSSSHMGGPPAGVGLPWAQRARLQPASVALRKQEEEEIKRSKALSDSYELSTDLQDKKVEMLERKYGGSFLSRRAARTIQTAFRQYRMNKNFERLRSSASESRMSRRIILSNMRMQFSFEEYEKAQNPAYFEGKPASLDEGAMAGARSHRLERGLPYGGSCGGGIDGGGSSVTTSGEFSNDITELEDSFSKQVKSLAESIDEALNCHPSGPMSEEPGSAQLEKRESKEQQEDSSATSFSDLPLYLDDTVPQQSPERLPSTEPPPQGRPEFWAPAPLPPVPPPVPSGTREDGSREEGTRRGPGCLECRDFRLRAAHLPLLTIEPPSDSSVDLSDRSDRGSVHRQLVYEADGCSPHGTLKHKGPPGRAPIPHRHYPAPEGPAPAPPGPLPPAPNSGTGPSGVAGGRRLGKCEAAGENSDGGDNESLESSSNSNETINCSSGSSSRDSLREPPATGLCKQTYQRETRHSWDSPAFNNDVVQRRHYRIGLNLFNKKPEKGIQYLIERGFLSDTPVGVAHFILERKGLSRQMIGEFLGNRQKQFNRDVLDCVVDEMDFSSMDLDDALRKFQSHIRVQGEAQKVERLIEAFSQRYCVCNPALVRQFRNPDTIFILAFAIILLNTDMYSPSVKAERKMKLDDFIKNLRGVDNGEDIPRDLLVGIYQRIQGRELRTNDDHVSQVQAVERMIVGKKPVLSLPHRRLVCCCQLYEVPDPNRPQRLGLHQREVFLFNDLLVVTKIFQKKKILVTYSFRQSFPLVEMHMQLFQNSYYQFGIKLLSAVPGGERKVLIIFNAPSLQDRLRFTSDLRESIAEVQEMEKYRVESELEKQKGMMRPNASQPGGAKDSVNGTMARSSLEDTYGAGDGLKRGALSSSLRDLSDAGKRGRRNSVGSLDSTIEGSVISSPRPHQRMPPPPPPPPPEEYKSQRPVSNSSSFLGSLFGSKRGKGPFQMPPPPTGQASASSSSASSTHHHHHHHHHGHSHGGLGVLPDGQSKLQALHAQYCQGPGPAPPPYLPPQQPSLPPPPQQPPPLPQLGSIPPPPASAPPVGPHRHFHAHGPVPGPQHYTLGRPGRAPRRGAGGHPQFAPHGRHPLHQPTSPLPLYSPAPQHPPAHKQGPKHFIFSHHPQMMPAAGAAGGPGSRPPGGSYSHPHHPQSPLSPHSPIPPHPSYPPLPPPSPHTPHSPLPPTSPHGPLHASGPPGTANPPSANPKAKPSRISTVV

SEQ ID NO: 438 - protein, 796 aa, Homo sapiens
MSAAQVSSSRRQSCYLCDLPRMPWAMIWDFSEPVCRGCVNYEGADRIEFVIETARQLKRAHGCFQDGRSPGPPPPVGVKTVALSAKEAAAAAAAAAAAAAAAQQQQQQQQQQQQQQQQQQQQQQQQQLNHVDGSSKPAVLAAPSGLERYGLSAAAAAAAAAAAAVEQRSRFEYPPPPVSLGSSSHTARLPNGLGGPNGFPKPTPEEGPPELNRQSPNSSSAAASVASRRGTHGGLVTGLPNPGGGGGPQLTVPPNLLPQTLLNGPASAAVLPPPPPHALGSRGPPTPAPPGAPGGPACLGGTPGVSATSSSASSSTSSSVAEVGVGAGGKRPGSVSSTDQERELKEKQRNAEALAELSESLRNRAEEWASKPKMVRDTLLTLAGCTPYEVRFKKDHSLLGRVFAFDAVSKPGMDYELKLFIEYPTGSGNVYSSASGVAKQMYQDCMKDFGRGLSSGFKYLEYEKKHGSGDWRLLGDLLPEAVRFFKEGVPGADMLPQPYLDASCPMLPTALVSLSRAPSAPPGTGALPPAAPSGRGAAASLRKRKASPEPPDSAEGALKLGEEQQRQQWMANQSEALKLTMSAGGFAAPGHAAGGPPPPPPPLGPHSNRTTPPESAPQNGPSPMAALMSVADTLGTAHSPKDGSSVHSTTASARRNSSSPVSPASVPGQRRLASRNGDLNLQVAPPPPSAHPGMDQVHPQNIPDSPMANSGPLCCTICHERLEDTHFVQCPSVPSHKFCFPCSRESIKAQGATGEVYCPSGEKCPLVGSNVPWAFMQGEIATILAGDVKVKKERDP

SEQ ID NO: 439 - protein, 1032 aa, Homo sapiens [sequence omitted]

SEQ ID NO: 440 - protein, 788 aa, Homo sapiens
MRARPRPRPLWATVLALGALAGVGVGGPNICTTRGVSSCQQCLAVSPMCAWCSDEALPLGSPRCDLKENLLKDNCAPESIEFPVSEARVLEDRPLSDKGSGDSSQVTQVSPQRIALRLRPDDSKNFSIQVRQVEDYPVDIYYLMDLSYSMKDDLWSIQNLGTKLATQMRKLTSNLRIGFGAFVDKPVSPYMYISPPEALENPCYDMKTTCLPMFGYKHVLTLTDQVTRFNEEVKKQSVSRNRDAPEGGFDAIMQATVCDEKIGWRNDASHLLVFTTDAKTHIALDGRLAGIVQPNDGQCHVGSDNHYSASTTMDYPSLGLMTEKLSQKNINLIFAVTENVVNLYQNYSELIPGTTVGVLSMDSSNVLQLIVDAYGKIRSKVELEVRDLPEELSLSFNATCLNNEVIPGLKSCMGLKIGDTVSFSIEAKVRGCPQEKEKSFTIKPVGFKDSLIVQVTFDCDCACQAQAEPNSHRCNNGNGTFECGVCRCGPGWLGSQCECSEEDYRPSQQDECSPREGQPVCSQRGECLCGQCVCHSSDFGKITGKYCECDDFSCVRYKGEMCSGHGQCSCGDCLCDSDWTGYYCNCTTRTDTCMSSNGLLCSGRGKCECGSCVCIQPGSYGDTCEKCPTCPDACTFKKECVECKKFDRGALHDENTCNRYCRDEIESVKELKDTGKDAVNCTYKNEDDCVVRFQYYEDSSGKSILYVVEEPECPKGPDILVVLLSVMGAILLIGLAALLIWKLLITIHDRKEFAKFEEERARAKWDTANNPLYKEATSTFTNITYRGT

SEQ ID NO: 441 - protein, 798 aa, Homo sapiens
MVALPMVLVLLLVLSRGESELDAKIPSTGDATEWRNPHLSMLGSCQPAPSCQKCILSHPSCAWCKQLNFTASGEAEARRCARREELLARGCPLEELEEPRGQQEVLQDQPLSQGARGEGATQLAPQRVRVTLRPGEPQQLQVRFLRAEGYPVDLYYLMDLSYSMKDDLERVRQLGHALLVRLQEVTHSVRIGFGSFVDKTVLPFVSTVPSKLRHPCPTRLERCQSPFSFHHVLSLTGDAQAFEREVGRQSVSGNLDSPEGGFDAILQAALCQEQIGWRNVSRLLVFTSDDTFHTAGDGKLGGIFMPSDGHCHLDSNGLYSRSTEFDYPSVGQVAQALSAANIQPIFAVTSAALPVYQELSKLIPKSAVGELSEDSSNVVQLIMDAYNSLSSTVTLEHSSLPPGVHISYESQCEGPEKREGKAEDRGQCNHVRINQTVTFWVSLQATHCLPEPHLLRLRALGFSEELIVELHTLCDCNCSDTQPQAPHCSDGQGHLQCGVCSCAPGRLGRLCECSVAELSSPDLESGCRAPNGTGPLCSGKGHCQCGRCSCSGQSSGHLCECDDASCERHEGILCGGFGRCQCGVCHCHANRTGRACECSGDMDSCISPEGGLCSGHGRCKCNRCQCLDGYYGALCDQCPGCKTPCERHRDCAECGAFRTGPLATNCSTACAHTNVTLALAPILDDGWCKERTLDNQLFFFLVEDDARGTVVLRVRPQEKGADHTQAIVLGCVGGIVAVGLGLVLAYRLSVEIYDRREYSRFEKEQQQLNWKQDSNPLYKSAITTTINPRFQEADSPTL

SEQ ID NO: 442 - protein, 2743 aa, Homo sapiens
MSDKMSSFLHIGDICSLYAEGSTNGFISTLGLVDDRCVVQPETGDLNNPPKKFRDCLFKLCPMNRYSAQKQFWKAAKPGANSTTDAVLLNKLHHAADLEKKQNETENRKLLGTVIQYGNVIQLLHLKSNKYLTVNKRLPALLEKNAMRVTLDEAGNEGSWFYIQPFYKLRSIGDSVVIGDKVVLNPVNAGQPLHASSHQLVDNPGCNEVNSVNCNTSWKIVLFMKWSDNKDDILKGGDVVRLFHAEQEKFLTCDEHRKKQHVFLRTTGRQSATSATSSKALWEVEVVQHDPCRGGAGYWNSLFRFKHLATGHYLAAEVDPDQDASRSRLRNAQEKMVYSLVSVPEGNDISSIFELDPTTLRGGDSLVPRNSYVRLRHLCTNTWVHSTNIPIDKEEEKPVMLKIGTSPVKEDKEAFAIVPVSPAEVRDLDFANDASKVLGSIAGKLEKGTITQNERRSVTKLLEDLVYFVTGGTNSGQDVLEVVFSKPNRERQKLMREQNILKQIFKLLQAPFTDCGDGPMLRLEELGDQRHAPFRHICRLCYRVLRHSQQDYRKNQEYIAKQFGFMQKQIGYDVLAEDTITALLHNNRKLLEKHITAAEIDTFVSLVRKNREPRFLDYLSDLCVSMNKSIPVTQELICKAVLNPTNADILIETKLVLSRFEFEGVSSTGENALEAGEDEEEVWLFWRDSNKEIRSKSVRELAQDAKEGQKEDRDVLSYYRYQLNLFARMCLDRQYLAINEISGQLDVDLILRCMSDENLPYDLRASFCRLMLHMHVDRDPQEQVTPVKYARLWSEIPSEIAIDDYDSSGASKDEIKERFAQTMEFVEEYLRDVVCQRFPFSDKEKNKLTFEVVNLARNLIYFGFYNFSDLLRLTKILLAILDCVHVTTIFPISKMAKGEENKGNNDVEKLKSSNVMRSIHGVGELMTQVVLRGGGFLPMTPMAAAPEGNVKQAEPEKEDIMVMDTKLKIIEILQFILNVRLDYRISCLLCIFKREFDESNSQTSETSSGNSSQEGPSNVPGALDFEHIEEQAEGIFGGSEENTPLDLDDHGGRTFLRVLLHLTMHDYPPLVSGALQLLFRHFSQRQEVLQAFKQVQLLVTSQDVDNYKQIKQDLDQLRSIVEKSELWVYKGQGPDETMDGASGENEHKKTEEGNNKPQKHESTSSYNYRVVKEILIRLSKLCVQESASVRKSRKQQQRLLRNMGAHAVVLELLQIPYEKAEDTKMQEIMRLAHEFLQNFCAGNQQNQALLHKHINLFLNPGILEAVTMQHIFMNNFQLCSEINERVVQHFVHCIETHGRNVQYIKFLQTIVKAEGKFIKKCQDMVMAELVNSGEDVLVFYNDRASFQTLIQMMRSERDRMDENSPLMYHIHLVELLAVCTEGKNVYTEIKCNSLLPLDDIVRVVTHEDCIPEVKIAYINFLNHCYVDTEVEMKEIYTSNHMWKLFENFLVDICRACNNTSDRKHADSILEKYVTEIVMSIVTTFFSSPFSDQSTTLQTRQPVFVQLLQGVFRVYHCNWLMPSQKASVESCIRVLSDVAKSRAIAIPVDLDSQVNNLFLKSHSIVQKTAMNWRLSARNAARRDSVLAASRDYRNIIERLQDIVSALEDRLRPLVQAELSVLVDVLHRPELLFPENTDARRKCESGGFICKLIKHTKQLLEENEEKLCIKVLQTLREMMTKDRGYGEKLISIDELDNAELPPAPDSENATEELEPSPPLRQLEDHKRGEALRQVLVNRYYGNVRPSGRRESLTSFGNGPLSAGGPGKPGGGGGGSGSSSMSRGEMSLAEVQCHLDKEGASNLVIDLIMNASSDRVFHESILLAIALLEGGNTTIQHSFFCRLTEDKKSEKFFKVFYDRMKVAQQEIKATVTVNTSDLGNKKKDDEVDRDAPSRKKAKEPTTQITEEVRDQLLEASAATRKAFTTFRREADPDDHYQPGEGTQATADKAKDDLEMSAVITIMQPILRFLQLLCENHNRDLQNFLRCQNNKTNYNLVCETLQFLDCICGSTTGGLGLLGLYINEKNVALINQTLESLTEYCQGPCHENQNCIATHESNGIDIITALILNDINPLGKKRMDLVLELKNNASKLLLAIMESRHDSENAERILYNMRPKELVEVIKKAYMQGEVEFEDGENGEDGAASPRNVGHNIYILAHQLARHNKELQSMLKPGGQVDGDEALEFYAKHTAQIEIVRLDRTMEQIVFPVPSICEFLTKESKLRIYYTTERDEQGSKINDFFLRSEDLFNEMNWQKKLRAQPVLYWCARNMSFWSSISFNLAVLMNLLVAFFYPFKGVRGGTLEPHWSGLLWTAMLISLAIVIALPKPHGIRALIASTILRLIFSVGLQPTLFLLGAFNVCNKIIFLMSFVGNCGTFTRGYRAMVLDVEFLYHLLYLVICAMGLFVHEFFYSLLLFDLVYREETLLNVIKSVTRNGRSIILTAVLALILVYLFSIVGYLFFKDDFILEVDRLPNETAVPETGESLASEFLFSDVCRVESGENCSSPAPREELVPAEETEQDKEHTCETLLMCIVTVLSHGLRSGGGVGDVLRKPSKEEPLFAARVIYDLLFFFMVIIIVLNLIFGVIIDTFADLRSEKQKKEEILKTTCFICGLERDKFDNKTVTFEEHIKEEHNMWHYLCFIVLVKVKDSTEYTGPESYVAEMIKERNLDWFPRMRAMSLVSSDSEGEQNELRNLQEKLESTMKLVTNLSGQLSELKDQMTEQRKQKQRIGLLGHPPHMNVNPQQPA

SEQ ID NO: 443 - protein, 831 aa, Homo sapiens
MSKKGRSKGEKPEMETDAVQMANEELRAKLTSIQIEFQQEKSKVGKLRERLQEAKLEREQEQRRHTAYISELKAKLHEEKTKELQALREGLIRQHEQEAARTAKIKEGELQRLQATLNVLRDGAADKVKTALLTEAREEARRAFDGERLRLQQEILELKAARKQAEEALSNCMQADKTKAADLRAAYQAHQDEVHRIKRECERDIRRLMDEIKGKDRVILALEKELGVQAGQTQKLLLQKEALDEQLVQVKEAERHHSSPKRELPPGIGDMVELMGVQDQHMDERDVRRFQLKIAELNSVIRKLEDRNTLLADERNELLKRSRETEVQLKPLVEKNKRMNKKNEDLLQSIQRMEEKIKNLTRENVEMKEKLSAQASLKRHTSLNDLSLTRDEQEIEFLRLQVLEQQHVIDDLSLERERLLRSKRHRGKSLKPPKKHVVETFFGFDEESVDSETLSETSYNTDRTDRTPATPEEDLDDATAREEADLRFCQLTREYQALQRAYALLQEQVGGTLDAEREARTREQLQADLLRCQAKIEDLEKLLVEKGQDSKWVEEKQLLIRTNQDLLEKIYRLEMEENQLKNEMQDAKDQNELLEFRVLELEERERRSPAFNLQITTFPENHSSALQLFCHQEGVKDVNVSELMKKLDILGDNGNLRNEEQVAIIQAGTVLALCEKWLKQIEGTEAALTQKMLDLEKEKDLFSRQKGYLEEELDYRKQALDQAYLKIQDLEATLYTALQQEPGRRAGEALSEGQREDLQAAVEKVRRQILRQSREFDSQILRERMELLQQAQQRIRELEDKLEFQKRHLKELEEKFLFLFLFFSLAFILWP

SEQ ID NO: 444 - protein, 1246 aa, Homo sapiens [sequence omitted]

SEQ ID NO: 445 - protein, 2540 aa, Homo sapiens
MAVETRAELVGKRFLCVAVGDEARSERWESGRGWRSWRAGVIRAVSHRDSRNPDLAVYVEFDDLEWDKREWVKVYEDFSTFLVEYHLIWAKRNDPSQTQGSKSKQIQWPALTFKPLVERNIPSSVTAVEFLVDKQLDFLTEDSAFQPYQDDIDSLNPVLRDNPQLHEEVKVWVKEQKVQEIFMQGPYSLNGYRVRVYRQDSATQWFTGIITHHDLFTRTMIVMNDQVLEPQNVDPSMVQMTFLDDVVHSLLKGENIGITSRRRSRANQNVNAVHSHYTRAQANSPRPAMNSQAAVPKQNTHQQQQQRSIRPNKRKGSDSSIPDEEKMKEEKYDYISRGENPKGKNKHLMNKRRKPEEDEKKLNMKRLRTDNVSDFSESSDSENSNKRIIDNSSEQKPENELKNKNTSKINGEEGKPHNNEKAGEETLKNSQPPWDQIQEDKKHEEAEKRKSVDTQLQEDMIIHSSEQSTVSDHNSNDLLPQECNMDKTHTMELLPKEKFVSRPPTPKCVIDITNDTNLEKVAQENSSTFGLQTLQKMDPNVSDSKHSIANAKFLETAKKDSDQSWVSDVVKVDLTQSSVTNASSGNDHLNMEKEKYVSYISPLSAVSVMEDKLHKRSPPPETIKSKLNTSVDTHKIKSSPSPEVVKPKITHSPDSVKSKATYVNSQATGERRLANKIEHELSRCSFHPIPTRSSTLETTKSPLIIDKNEHFTVYRDPALIGSETGANHISPFLSQHPFPLHSSSHRTCLNPGTHHPALTPAPHLLAGSSSQTPLPTINTHPLTSGPHHAVHHPHLLPTVLPGVPTASLLGGHPRLESAHASSLSHLALAHQQQQQLLQHQSPHLLGQAHPSASYNQLGLYPIIWQYPNGTHAYSGLGLPSSKWVHPENAVNAEASLRRNSPSPWLHQPTPVTSADGIGLLSHIPVRPSSAEPHRPLKITAHSSPPLTKTLVDHHKEELERKAFMEPLRSVASTSAKNDLDLNRSQTGKDCHLHRHFVDPVLNQLQRPPQETGERLNKYKEEHRRILQESIDVAPFTTKIKGLEGERENYSRVASSSSSPKSHIIKQDMDVERSVSDLYKMKHSVPQSLPQSNYFTTLSNSVVNEPPRSYPSKEVSNIYGDKQSNALAAAAANPQTLTSFITSLSKPPPLIKHQPESEGLVGKIPEHLPHQIASHSVTTFRNDCRSPTHLTVSSTNTLRSMPALHRAPVFHPPIHHSLERKEGSYSSLSPPTLTPVMPVNAGGKVQESQKPPTLIPEPKDSQANFKSSSEQSLTEMWRPNNNLSKEKTEWHVEKSSGKLQAAMASVIVRPSSSTKTDSMPAMQLASKDRVSERSSAGAHKTDCLKLAEAGETGRIILPNVNSDSVHTKSEKNFQAVSQGSVPSSVMSAVNTMCNTKTDVITSAADTTSVSSWGGSEVISSLSNTILASTSSECVSSKSVSQPVAQKQECKVSTTAPVTLASSKTGSVVQPSSGFSGTTDFIHLKKHKAALAAAQYKSSNASETEPNAIKNQTLSASLPLDSTVICSTINKANSVGNGQASQTSQPNYHTKLKKAWLTRHSEEDKNTNKMENSGNSVSEIIKPCSVNLIASTSSDIQNSVDSKIIVDKYVKDDKVNRRKAKRTYESGSESGDSDESESKSEQRTKRQPKPTYKKKQNDLQKRKGEIEEDLKPNGVLSRSAKERSKLKLQSNSNTGIPRSVLKDWRKVKKLKQTGESFLQDDSCCEIGPNLQKCRECRLIRSKKGEEPAHSPVFCRFYYFRRLSFSKNGVVRIDGFSSPDQYDDEAMSLWTHENFEDDELDIETSKYILDIIGDKFCQLVTSEKTALSWVKKDAKIAWKRAVRGVREMCDACEATLFNIHWVCQKCGFVVCLDCYKAKERKSSRDKELYAWMKCVKGQPHDHKHLMPTQIIPGSVLTDLLDAMHTLREKYGIKSHCHCTNKQNLQVGNFPTMNGVSQVLQNVLNHSNKISLCMPESQQQNTPPKSEKNGGSSPESDVGTDNKLTPPESQSPLHWLADLAEQKAREEKKENKELTLENQIKEEREQDNSESPNGRTSPLVSQNNEQGSTLRDLLTTTAGKLRVGSTDAGIAFAPVYSMGAPSSKSGRTMPNILDDIIASVVENKIPPSKTSKINVKPELKEEPEESIISAVDENNKLYSDIPHSWICEKHILWLKDYKNSSNWKLFKECWKQGQPAVVSGVHKKMNISLWKAESISLDFGDHQADLLNCKDSIISNANVKEFWDGFEEVSKRQKNKSGETVVLKLKDWPSGEDFKTMMPARYEDLLKSLPLPEYCNPEGKFNLASHLPGFFVRPDLGPRLCSAYGVVAAKDHDIGTTNLHIEVSDVVNILVYVGIAKGNGILSKAGILKKFEEEDLDDILRKRLKDSSEIPGALWHIYAGKDVDKIREFLQKISKEQGLEVLPEHDPIRDQSWYVNKKLRQRLLEEYGVRTCTLIQFLGDAIVLPAGALHQVQNFHSCIQVTEDFVSPEHLVESFHLTQELRLLKEEINYDDKLQVKNILYHAVKEMVRALKIHEDEVEDMEEN

SEQ ID NO: 446 - protein, 1352 aa, Homo sapiens
MAHTTKVNGSASGKAGDILSGDQDKEQKDPYFVETPYGYQLDLDFLKYVDDIQKGNTIKRLNIQKRRKPSVPCPEPRTTSGQQGIWTSTESLSSSNSDDNKQCPNFLIARSQVTSTPISKPPPPLETSLPFLTIPENRQLPPPSPQLPKHNLHVTKTLMETRRRLEQERATMQMTPGEFRRPRLASFGGMGTTSSLPSFVGSGNHNPAKHQLQNGYQGNGDYGSYAPAAPTTSSMGSSIRHSPLSSGISTPVTNVSPMHLQHIREQMAIALKRLKELEEQVRTIPVLQVKISVLQEEKRQLVSQLKNQRAASQINVCGVRKRSYSAGNASQLEQLSRARRSGGELYIDYEEEEMETVEQSTQRIKEFRQLTADMQALEQKIQDSSCEASSELRENGECRSVAVGAEENMNDIVVYHRGSRSCKDAAVGTLVEMRNCGVSVTEAMLGVMTEADKEIELQQQTIESLKEKIYRLEVQLRETTHDREMTKLKQELQAAGSRKKVDKATMAQPLVFSKVVEAVVQTRDQMVGSHMDLVDTCVGTSVETNSVGISCQPECKNKVVGPELPMNWWIVKERVEMHDRCAGRSVEMCDKSVSVEVSVCETGSNTEESVNDLTLLKTNLNLKEVRSIGCGDCSVDVTVCSPKECASRGVNTEAVSQVEAAVMAVPRTADQDTSTDLEQVHQFTNTETATLIESCTNTCLSTLDKQTSTQTVETRTVAVGEGRVKDINSSTKTRSIGVGTLLSGHSGFDRPSAVKTKESGVGQININDNYLVGLKMRTIACGPPQLTVGLTASRRSVGVGDDPVGESLENPQPQAPLGMMTGLDHYIERIQKLLAEQQTLLAENYSELAEAFGEPHSQMGSLNSQLISTLSSINSVMKSASTEELRNPDFQKTSLGKITGNYLGYTCKCGGLQSGSPLSSQTSQPEQEVGTSEGKPISSLDAFPTQEGTLSPVNLTDDQIAAGLYACTNNESTLKSIMKKKDGNKDSNGAKKNLQFVGINGGYETTSSDDSSSDESSSSESDDECDVIEYPLEEEEEEEDEDTRGMAEGHHAVNIEGLKSARVEDEMQVQECEPEKVEIRERYELSEKMLSACNLLKNTINDPKALTSKDMRFCLNTLQHEWFRVSSQKSAIPAMVGDYIAAFEAISPDVLRYVINLADGNGNTALHYSVSHSNFEIVKLLLDADVCNVDHQNKAGYTPIMLAALAAVEAEKDMRIVEELFGCGDVNAKASQAGQTALMLAVSHGRIDMVKGLLACGADVNIQDDEGSTALMCASEHGHVEIVKLLLAQPGCNGHLEDNDGSTALSIALEAGHKDIAVLLYAHVNFAKAQSPGTPRLGRKTSPGPTHRGSFD

SEQ ID NO: 447 - protein, 832 aa, Homo sapiens
MSEAGGAGPGGCGAGAGAGAGPGALPPQPAALPPAPPQGSPCAAAAGGSGACGPATAVAAAGTAEGPGGGGSARIAVKKAQLRSAPRAKKLEKLGVYSACKAEESCKCNGWKNPNPSPTPPRADLQQIIVSLTESCRSCSHALAAHVSHLENVSEEEMNRLLGIVLDVEYLFTCVHKEEDADTKQVYFYLFKLLRKSILQRGKPVVEGSLEKKPPFEKPSIEQGVNNFVQYKFSHLPAKERQTIVELAKMFLNRINYWHLEAPSQRRLRSPNDDISGYKENYTRWLCYCNVPQFCDSLPRYETTQVFGRTLLRSVFTVMRRQLLEQARQEKDKLPLEKRTLILTHFPKFLSMLEEEVYSQNSPIWDQDFLSASSRTSQLGIQTVINPPPVAGTISYNSTSSSLEQPNAGSSSPACKASSGLEANPGEKRKMTDSHVLEEAKKPRVMGDIPMELINEVMSTITDPAAMLGPETNFLSAHSARDEAARLEERRGVIEFHVVGNSLNQKPNKKILMWLVGLQNVFSHQLPRMPKEYITRLVFDPKHKTLALIKDGRVIGGICFRMFPSQGFTEIVFCAVTSNEQVKGYGTHLMNHLKEYHIKHDILNFLTYADEYAIGYFKKQGFSKEIKIPKTKYVGYIKDYEGATLMGCELNPRIPYTEFSVIIKKQKEIIKKLIERKQAQIRKVYPGLSCFKDGVRQIPIESIPGIRETGWKPSGKEKSKEPRDPDQLYSTLKSILQQVKSHQSAWPFMEPVKRTEAPGYYEVIRFPMDLKTMSERLKNRYYVSKKLFMADLQRVFTNCKEYNPPESEYYKCANILEKFFFSKIKEAGLIDK

SEQ ID NO: 448 - protein, 2004 aa, Homo sapiens
MVKLANPLYTEWILEAIKKVKKQKQRPSEERICNAVSSSHGLDRKTVLEQLELSVKDGTILKVSNKGLNSYKDPDNPGRIALPKPRNHGKLDNKQNVDWNKLIKRAVEGLAESGGSTLKSIERFLKGQKDVSALFGGSAASGFHQQLRLAIKRAIGHGRLLKDGPLYRLNTKATNVDGKESCESLSCLPPVSLLPHEKDKPVAEPIPICSFCLGTKEQNREKKPEELISCADCGNSGHPSCLKFSPELTVRVKALRWQCIECKTCSSCRDQGKNADNMLFCDSCDRGFHMECCDPPLTRMPKGMWICQICRPRKKGRKLLQKKAAQIKRRYTNPIGRPKNRLKKQNTVSKGPFSKVRTGPGRGRKRKITLSSQSASSSSEEGYLERIDGLDFCRDSNVSLKFNKKTKGLIDGLTKFFTPSPDGRKARGEVVDYSEQYRIRKRGNRKSSTSDWPTDNQDGWDGKQENEERLFGSQEIMTEKDMELFRDIQEQALQKVGVTGPPDPQVRCPSVIEFGKYEIHTWYSSPYPQEYSRLPKLYLCEFCLKYMKSRTILQQHMKKCGWFHPPANEIYRKNNISVFEVDGNVSTIYCQNLCLLAKLFLDHKTLYYDVEPFLFYVLTQNDVKGCHLVGYFSKEKHCQQKYNVSCIMILPQYQRKGYGRFLIDFSYLLSKREGQAGSPEKPLSDLGRLSYMAYWKSVILECLYHQNDKQISIKKLSKLTGICPQDITSTLHHLRMLDFRSDQFVIIRREKLIQDHMAKLQLNLRPVDVDPECLRWTPVIVSNSVVSEEEEEEAEEGENEEPQCQERELEISVGKSVSHENKEQDSYSVESEKKPEVMAPVSSTRLSKQVLPHDSLPANSQPSRRGRWGRKNRKTQERFGDKDSKLLLEETSSAPQEQYGECGEKSEATQEQYTESEEQLVASEEQPSQDGKPDLPKRRLSEGVEPWRGQLKKSPEALKCRLTEGSERLPRRYSEGDRAVLRGFSESSEEEEEPESPRSSSPPILTKPTLKRKKPFLHRRRRVRKRKHHNSSVVTETISETTEVLDEPFEDSDSERPMPRLEPTFEIDEEEEEEDENELFPREYFRRLSSQDVLRCQSSSKRKSKDEEEDEESDDADDTPILKPVSLLRKRDVKNSPLEPDTSTPLKKKKGWPKGKSRKPIHWKKRPGRKPGFKLSREIMPVSTQACVIEPIVSIPKAGRKPKIQESEETVEPKEDMPLPEERKEEEEMQAEAEEAEEGEEEDAASSEVPAASPADSSNSPETETKEPEVEEEEEKPRVSEEQRQSEEEQQELEEPEPEEEEDAAAETAQNDDHDADDEDDGHLESTKKKELEEQPTREDVKEEPGVQESFLDANMQKSREKIKDKEETELDSEEEQPSHDTSVVSEQMAGSEDDHEEDSHTKEELIELKEEEEIPHSELDLETVQAVQSLTQEESSEHEGAYQDCEETLAACQTLQSYTQADEDPQMSMVEDCHASEHNSPISSVQSHPSQSVRSVSSPNVPALESGYTQISPEQGSLSAPSMQNMETSPMMDVPSVSDHSQQVVDSGFSDLGSIESTTENYENPSSYDSTMGGSICGNSSSQSSCSYGGLSSSSSLTQSSCVVTQQMASMGSSCSMMQQSSVQPAANCSIKSPQSCVVERPPSNQQQQPPPPPPQQPQPPPPQPQPAPQPPPPQQQPQQQPQPQPQQPPPPPPPQQQPPLSQCSMNNSFTPAPMIMEIPESGSTGNISIYERIPGDFGAGSYSQPSATFSLAKLQQLTNTIMDPHAMPYSHSPAVTSYATSVSLSNTGLAQLAPSHPLAGTPQAQATMTPPPNLASTTMNLTSPLLQCNMSATNIGIPHTQRLQGQMPVKGHISIRSKSAPLPSAAAHQQQLYGRSPSAVAMQAGPRALAVQRGMNMGVNLMPTPAYNVNSMNMNTLNAMNSYRMTQPMMNSSYHSNPAYMNQTAQYPMQMQMGMMGSQAYTQQPMQPNPHGNMMYTGPSHHSYMNAAGVPKQSLNGPYMRR

SEQ ID NO: 449 - protein, 466 aa, Homo sapiens
MEYESYYFVKFQKYPKIVKKSSDTAENNLPQRSRGKTRRMMNDSCQNLPKINQQRPRSKTTAGKTGDTKSLNKEHPNQEVVDNTRLESANFGLHISRIRKDSGEENAHPRRGQIIDFQGLLTDAIKGATSELALNTFDHNPDPSERLLKPLSAFIGMNSEMRELAAVVSRDIYLHNPNIKWNDIIGLDAAKQLVKEAVVYPIRYPQLFTGILSPWKGLLLYGPPGTGKTLLAKAVATECKTTFFNISASTIVSKWRGDSEKLVRVLFELARYHAPSTIFLDELESVMSQRGTASGGEHEGSLRMKTELLVQMDGLARSEDLVFVLAASNLPWELDCAMLRRLEKRILVDLPSREARQAMIYHWLPPVSKSRALELHTELEYSVLSQETEGYSGSDIKLVCREAAMRPVRKIFDALENHQSESSDLPRIQLDIVTTADFLDVLTHTKPSAKNLAQRYSDWQREFESV

SEQ ID NO: 450 - protein, 630 aa, Homo sapiens
MAAGVAAWLPFARAAAIGWMPVASGPMPAPPRQERKRTQDALIVLNVSGTRFQTWQDTLERYPDTLLGSSERDFFYHPETQQYFFDRDPDIFRHILNFYRTGKLHYPRHECISAYDEELAFFGLIPEIIGDCCYEEYKDRRRENAERLQDDADTDTAGESALPTMTARQRVWRAFENPHTSTMALVFYYVTGFFIAVSVIANVVETVPCGSSPGHIKELPCGERYAVAFFCLDTACVMIFTVEYLLRLAAAPSRYRFVRSVMSIIDVVAILPYYIGLVMTDNEDVSGAFVTLRVFRVFRIFKFSRHSQGLRILGYTLKSCASELGFLLFSLTMAIIIFATVMFYAEKGSSASKFTSIPAAFWYTIVTMTTLGYGDMVPKTIAGKIFGSICSLSGVLVIALPVPVIVSNFSRIYHQNQRADKRRAQKKARLARIRAAKSGSANAYMQSKRNGLLSNQLQSSEDEQAFVSKSGSSFETQHHHLLHCLEKTTNHEFVDEQVFEESCMEVATVNRPSSHSPSLSSQQGVTSTCCSRRHKKTFRIPNANVSGSHQGSIQELSTIQIRCVERTPLSNSRSSLNAKMEECVKLNCEQPYVTTAIISIPTPPVTTPEGDDRPESPEYSGGNIVRVSAL

SEQ ID NO: 451 - protein, 379 aa, Homo sapiens
MTSVAKVYYSQTTQTESRPLMGPGIRRRRVLTKDGRSNVRMEHIADKRFLYLKDLWTTFIDMQWRYKLLLFSATFAGTWFLFGVVWYLVAVAHGDLLELDPPANHTPCVVQVHTLTGAFLFSLESQTTIGYGFRYISEECPLAIVLLIAQLVLTTILEIFITGTFLAKIARPKKRAETIRFSQHAVVASHNGKPCLMIRVANMRKSLLIGCQVTGKLLQTHQTKEGENIRLNQVNVTFQVDTASDSPFLILPLTFYHVVDETSPLKDLPLRSGEGDFELVLILSGTVESTSATCQVRTSYLPEEILWGYEFTPAISLSASGKYIADFSLFDQVVKVASPSGLRDSTVRYGDPEKLKLEESLREQAEKEGSALSVRISNV

SEQ ID NO: 452 - protein, 433 aa, Homo sapiens
MTAASRANPYSIVSSEEDGLHLVTMSGANGFGNGKVHTRRRCRNRFVKKNGQCNIEFANMDEKSQRYLADMFTTCVDIRWRYMLLIFSLAFLASWLLFGIIFWVIAVAHGDLEPAEGRGRTPCVMQVHGFMAAFLFSIETQTTIGYGLRCVTEECPVAVFMVVAQSIVGCIIDSFMIGAIMAKMARPKKRAQTLLFSHNAVVALRDGKLCLMWRVGNLRKSHIVEAHVRAQLIKPRVTEEGEYIPLDQIDIDVGFDKGLDRIFLVSPITILHEIDEASPLFGISRQDLETDDFEIVVILEGMVEATAMTTQARSSYLANEILWGHRFEPVLFEEKNQYKIDYSHFHKTYEVPSTPRCSAKDLVENKFLLPSANSFCYENELAFLSRDEEDEADGDQDGRSRDGLSPQARHDFDRLQAGGGVLEQRPYRRESEI

SEQ ID NO: 453 - protein, 375 aa, Homo sapiens
MDAIHIGMSSTPLVKHTAGAGLKANRPRVMSKSGHSNVRIDKVDGIYLLYLQDLWTTVIDMKWRYKLTLFAATFVMTWFLFGVIYYAIAFIHGDLEPGEPISNHTPCIMKVDSLTGAFLFSLESQTTIGYGVRSITEECPHAIFLLVAQLVITTLIEIFITGTFLAKIARPKKRAETIKFSHCAVITKQNGKLCLVIQVANMRKSLLIQCQLSGKLLQTHVTKEGERILLNQATVKFHVDSSSESPFLILPMTFYHVLDETSPLRDLTPQNLKEKEFELVVLLNATVESTSAVCQSRTSYIPEEIYWGFEFVPVVSLSKNGKYVADFSQFEQIRKSPDCTFYCADSEKQQLEEKYRQEDQRERELRTLLLQQSNV

SEQ ID NO: 454 - protein, 427 aa, Homo sapiens
MGSVRTNRYSIVSSEEDGMKLATMAVANGFGNGKSKVHTRQQCRSRFVKKDGHCNVQFINVGEKGQRYLADIFTTCVDIRWRWMLVIFCLAFVLSWLFFGCVFWLIALLHGDLDASKEGKACVSEVNSFTAAFLFSIETQTTIGYGFRCVTDECPIAVFMVVFQSIVGCIIDAFIIGAVMAKMAKPKKRNETLVFSHNAVIAMRDGKLCLMWRVGNLRKSHLVEAHVRAQLLKSRITSEGEYIPLDQIDINVGFDSGIDRIFLVSPITIVHEIDEDSPLYDLSKQDIDNADFEIVVILEGMVEATAMTTQCRSSYLANEILWGHRYEPVLFEEKHYYKVDYSRFHKTYEVPNTPLCSARDLAEKKYILSNANSFCYENEVALTSKEEDDSENGVPESTSTDTPPDIDLHNQASVPLEPRPLRRESEI

SEQ ID NO: 455 - protein, 1236 aa, Homo sapiens
MANGGGGGGGSSGGGGGGGGSSLRMSSNIHANHLSLDASSSSSSSSSSSSSSSSSSSSSSVHEPKMDALIIPVTMEVPCDSRGQRMWWAFLASSMVTFFGGLFIILLWRTLKYLWTVCCHCGGKTKEAQKINNGSSQADGTLKPVDEKEEAVAAEVGWMTSVKDWAGVMISAQTLTGRVLVVLVFALSIGALVIYFIDSSNPIESCQNFYKDFTLQIDMAFNVFFLLYFGLRFIAANDKLWFWLEVNSVVDFFTVPPVFVSVYLNRSWLGLRFLRALRLIQFSEILQFLNILKTSNSIKLVNLLSIFISTWLTAAGFIHLVENSGDPWENFQNNQALTYWECVYLLMVTMSTVGYGDVYAKTTLGRLFMVFFILGGLAMFASYVPEIIELIGNRKKYGGSYSAVSGRKHIVVCGHITLESVSNFLKDFLHKDRDDVNVEIVFLHNISPNLELEALFKRHFTQVEFYQGSVLNPHDLARVKIESADACLILANKYCADPDAEDASNIMRVISIKNYHPKIRIITQMLQYHNKAHLLNIPSWNWKEGDDAICLAELKLGFIAQSCLAQGLSTMLANLFSMRSFIKIEEDTWQKYYLEGVSNEMYTEYLSSAFVGLSFPTVCELCFVKLKLLMIAIEYKSANRESRILINPGNHLKIQEGTLGFFIASDAKEVKRAFFYCKACHDDITDPKRIKKCGCKRPKMSIYKRMRRACCFDCGRSERDCSCMSGRVRGNVDTLERAFPLSSVSVNDCSTSFRAFEDEQPSTLSPKKKQRNGGMRNSPNTSPKLMRHDPLLIPGNDQIDNMDSNVKKYDSTGMFHWCAPKEIEKVILTRSEAAMTVLSGHVVVCIFGDVSSALIGLRNLVMPLRASNFHYHELKHIVFVGSIEYLKREWETLHNFPKVSILPGTPLSRADLRAVNINLCDMCVILSANQNNIDDTSLQDKECILASLNIKSMQFDDSIGVLQANSQGFTPPGMDRSSPDNSPVHGMLRQPSITTGVNIPIITELVNDTNVQFLDQDDDDDPDTELYLTQPFACGTAFAVSVLDSLMSATYFNDNILTLIRTLVTGGATPELEALIAEENALRGGYSTPQTLANRDRCRVAQLALLDGPFADLGDGGCYGDLFCKALKTYNMLCFGIYRLRDAHLSTPSQCTKRYVITNPPYEFELVPTDLIFCLMQFDHNAGQSRASLSHSSHSSQSSSKKSSSVHSIPSTANRQNRPKSRESRDKQKYVQEERL

SEQ ID NO: 456 - protein, 872 aa, Homo sapiens [sequence omitted]

SEQ ID NO: 457 - skipped

SEQ ID NO: 458 - protein, 872 aa, Homo sapiens
MGLKARRAAGAAGGGGDGGGGGGGAANPAGGDAAAAGDEERKVGLAPGDVEQVTLALGAGADKDGTLLLEGGGRDEGQRRTPQGIGLLAKTPLSRPVKRNNAKYRRIQTLIYDALERPRGWALLYHALVFLIVLGCLILAVLTTFKEYETVSGDWLLLLETFAIFIFGAEFALRIWAAGCCCRYKGWRGRLKFARKPLCMLDIFVLIASVPVVAVGNQGNVLATSLRSLRFLQILRMLRMDRRGGTWKLLGSAICAHSKELITAWYIGFLTLILSSFLVYLVEKDVPEVDAQGEEMKEEFETYADALWWGLITLATIGYGDKTPKTWEGRLIAATFSLIGVSFFALPAGILGSGLALKVQEQHRQKHFEKRRKPAAELIQAAWRYYATNPNRIDLVATWRFYESVVSFPFFRKEQLEAASSQKLGLLDRVRLSNPRGSNTKGKLFTPLNVDAIEESPSKEPKPVGLNNKERFRTAFRMKAYAFWQSSEDAGTGDPMAEDRGYGNDFPIEDMIPTLKAAIRAVRILQFRLYKKKFKETLRPYDVKDVIEQYSAGHLDMLSRIKYLQTRIDMIFTPGPPSTPKHKKSQKGSAFTFPSQQSPRNEPYVARPSTSEIEDQSMMGKFVKVERQVQDMGKKLDFLVDMHMQHMERLQVQVTEYYPTKGTSSPAEAEKKEDNRYSDLKTIICNYSETGPPEPPYSFHQVTIDKVSPYGFFAHDPVNLPRGGPSSGKVQATPPSSATTYVERPTVLPILTLLDSRVSCHSQADLQGPYSDRISPRQRRSITRDSDTPLSLMSVNHEELERSPSGFSISQDRDDYVFGPNGGSSWMREKRYLAEGETDTDTDPFTPSGSMPLSSTGDGISDSVWTPSNKPI

SEQ ID NO: 459 - protein, 1235 aa, Homo sapiens
MPLPDGARTPGGVCREARGGGYTNRTFEFDDGQCAPRRPCAGDGALLDTAGFKMSDLDSEVLPLPPRYRFRDLLLGDPSFQNDDRVQVEFYVNENTFKERLKLFFIKNQRSSLRIRLFNFSLKLLTCLLYIVRVLLDDPALGIGCWGCPKQNYSFNDSSSEINWAPILWVERKMTLWAIQVIVAIISFLETMLLIYLSYKGNIWEQIFRVSFVLEMINTLPFIITIFWPPLRNLFIPVFLNCWLAKHALENMINDFHRAILRTQSAMFNQVLILFCTLLCLVFTGTCGIQHLERAGENLSLLTSFYFCIVTFSTVGYGDVTPKIWPSQLLVVIMICVALVVLPLQFEELVYLWMERQKSGGNYSRHRAQTEKHVVLCVSSLKIDLLMDFLNEFYAHPRLQDYYVVILCPTEMDVQVRRVLQIPLWSQRVIYLQGSALKDQDLMRAKMDNGEACFILSSRNEVDRTAADHQTILRAWAVKDFAPNCPLYVQILKPENKFHVKFADHVVCEEECKYAMLALNCICPATSTLITLLVHTSRGQEGQESPEQWQRMYGRCSGNEVYHIRMGDSKFFREYEGKSFTYAAFHAHKKYGVCLIGLKREDNKSILLNPGPRHILAASDTCFYINITKEENSAFIFKQEEKRKKRAFSGQGLHEGPARLPVHSIIASMGTVAMDLQGTEHRPTQSGGGGGGSKLALPTENGSGSRRPSIAPVLELADSSALLPCDLLSDQSEDEVTPSDDEGLSVVEYVKGYPPNSPYIGSSPTLCHLLPVKAPFCCLRLDKGCKHNSYEDAKAYGFKNKLIIVSAETAGNGLYNFIVPLRAYYRSRKELNPIVLLLDNKPDHHFLEAICCFPMVYYMEGSVDNLDSLLQCGIIYADNLVVVDKESTMSAEEDYMADAKTIVNVQTMFRLFPSLSITTELTHPSNMRFMQFRAKDSYSLALSKLEKRERENGSNLAFMFRLPFAAGRVFSISMLDTLLYQSFVKDYMITITRLLLGLDTTPGSGYLCAMKITEGDLWIRTYGRLFQKLCSSSAEIPIGIYRTESHVFSTSEPHDLRAQSQISVNVEDCEDTREVKGPWGSRAGTGGSSQGRHTGGGDPAEHPLLRRKSLQWARRLSRKAPKQAGRAAAAEWISQQRLSLYRRSERQELSELVKNRMKHLGLPTTGYDEMNDHQNTLSYVLINPPPDTRLEPSDIVYLIRSDPLAHVASSSQSRKSSCSHKLSSCNPETRDETQL

SEQ ID NO: 460 - protein, 329 aa, Homo sapiens
MSAEASGPAAAAAPSLEAPKPSGLEPGPAAYGLKPLTPNSKYVKLNVGGSLHYTTLRTLTGQDTMLKAMFSGRVEVLTDAGGWVLIDRSGRHFGTILNYLRDGSVPLPESTRELGELLGEARYYLVQGLIEDCQLALQQKRETLSPLCLIPMVTSPREEQQLLASTSKPVVKLLHNRSNNKYSYTSTSDDNLLKNIELFDKLALRFHGRLLFLKDVLGDEICCWSFYGQGRKIAEVCCTSIVYATEKKQTKVEFPEARIFEETLNILIYETPRGPDPALLEATGGAAGAGGAGRGEDEENREHRVRRIHVRRHITHDERPHGQQIVFKD

SEQ ID NO: 461 - protein, 1096 aa, Homo sapiens
MGSEDHGAQNPSCKIMTFRPTMEEFKDFNKYVAYIESQGAHRAGLAKIIPPKEWKPRQTYDDIDDVVIPAPIQQVVTGQSGLFTQYNIQKKAMTVGEYRRLANSEKYCTPRHQDFDDLERKYWKNLTFVSPIYGADISGSLYDDDVAQWNIGSLRTILDMVERECGTIIEGVNTPYLYFGMWKTTFAWHTEDMDLYSINYLHFGEPKSWYAIPPEHGKRLERLAIGFFPGSSQGCDAFLRHKMTLISPIILKKYGIPFSRITQEAGEFMITFPYGYHAGFNHGFNCAESTNFATLRWIDYGKVATQCTCRKDMVKISMDVFVRILQPERYELWKQGKDLTVLDHTRPTALTSPELSSWSASRASLKAKLLRRSHRKRSQPKKPKPEDPKFPGEGTAGAALLEEAGGSVKEEAGPEVDPEEEEEEPQPLPHGREAEGAEEDGRGKLRPTKAKSERKKKSFGLLPPQLPPPPAHFPSEEALWLPSPLEPPVLGPGPAAMEESPLPAPLNVVPPEVPSEELEAKPRPIIPMLYVVPRPGKAAFNQEHVSCQQAFEHFAQKGPTWKEPVSPMELTGPEDGAASSGAGRMETKARAGEGQAPSTFSKLKMEIKKSRRHPLGRPPTRSPLSVVKQEASSDEEASPFSGEEDVSDPDALRPLLSLQWKNRAASFQAERKFNAAAARTEPYCAICTLFYPYCQALQTEKEAPIASLGEGCPATLPSKSRQKTRPLIPEMCFTSGGENTEPLPANSYIGDDGTSPLIACGKCCLQVHASCYGIRPELVNEGWTCSRCAAHAWTAECCLCNLRGGALQMTTDRRWIHVICAIAVPEARFLNVIERHPVDISAIPEQRWKLKCVYCRKRMKKVSGACIQCSYEHCSTSFHVTCAHAAGVLMEPDDWPYVVSITCLKHKSGGHAVQLLRAVSLGQVVITKNRNGLYYRCRVIGAASQTCYEVNFDDGSYSDNLYPESITSRDCVQLGPPSEGELVELRWTDGNLYKAKFISSVTSHIYQVEFEDGSQLTVKRGDIFTLEEELPKRVRSRLSLSTGAPQEPAFSGEEAKAAKRPRVGTPLATEDSGRSQDYVAFVESLLQVQGRPGAPF

SEQ ID NO: 462 - protein, 1544 aa, Homo sapiens
MEAATTLHPGPRPALPLGGPGPLGEFLPPPECPVFEPSWEEFADPFAFIHKIRPIAEQTGICKVRPPPDWQPPFACDVDKLHFTPRIQRLNELEAQTRVKLNFLDQIAKYWELQGSTLKIPHVERKILDLFQLNKLVAEEGGFAVVCKDRKWTKIATKMGFAPGKAVGSHIRGHYERILNPYNLFLSGDSLRCLQKPNLTTDTKDKEYKPHDIPQRQSVQPSETCPPARRAKRMRAEAMNIKIEPEETTEARTHNLRRRMGCPTPKCENEKEMKSSIKQEPIERKDYIVENEKEKPKSRSKKATNAVDLYVCLLCGSGNDEDRLLLCDGCDDSYHTFCLIPPLHDVPKGDWRCPKCLAQECSKPQEAFGFEQAARDYTLRTFGEMADAFKSDYFNMPVHMVPTELVEKEFWRLVSTIEEDVTVEYGADIASKEFGSGFPVRDGKIKLSPEEEEYLDSGWNLNNMPVMEQSVLAHITADICGMKLPWLYVGMCFSSFCWHIEDHWSYSINYLHWGEPKTWYGVPGYAAEQLENVMKKLAPELFVSQPDLLHQLVTIMNPNTLMTHEVPVYRTNQCAGEFVITFPRAYHSGFNQGFNFAEAVNFCTVDWLPLGRQCVEHYRLLHRYCVFSHDEMICKMASKADVLDVVVASTVQKDMAIMIEDEKALRETVRKLGVIDSERMDFELLPDDERQCVKCKTTCFMSAISCSCKPGLLVCLHHVKELCSCPPYKYKLRYRYTLDDLYPMMNALKLRAESYNEWALNVNEALEAKINKKKSLVSFKALIEESEMKKFPDNDLLRHLRLVTQDAEKCASVAQQLLNGKRQTRYRSGGGKSQNQLTVNELRQFVTQLYALPCVLSQTPLLKDLLNRVEDFQQHSQKLLSEETPSAAELQDLLDVSFEFDVELPQLAEMRIRLEQARWLEEVQQACLDPSSLTLDDMRRLIDLGVGLAPYSAVEKAMARLQELLTVSEHWDDKAKSLLKARPRHSLNSLATAVKEIEEIPAYLPNGAALKDSVQRARDWLQDVEGLQAGGRVPVLDTLIELVTRGRSIPVHLNSLPRLETLVAEVQAWKECAVNTFLTENSPYSLLEVLCPRCDIGLLGLKRKQRKLKEPLPNGKKKSTKLESLSDLERALTESKETASAMATLGEARLREMEALQSLRLANEGKLLSPLQDVDIKICLCQKAPAAPMIQCELCRDAFHTSCVAVPSISQGLRIWLCPHCRRSEKPPLEKILPLLASLQRIRVRLPEGDALRYMIERTVNWQHRAQQLLSSGNLKFVQDRVGSGLLYSRWQASAGQVSDTNKVSQPPGTTSFSLPDDWDNRTSYLHSPFSTGRSCIPLHGVSPEVNELLMEAQLLQVSLPEIQELYQTLLAKPSPAQQTDRSSPVRPSSEKNDCCRGKRDGINSLERKLKRRLEREGLSSERWERVKKMRTPKKKKIKLSHPKDMNNFKLERERSYELVRSAETHSLPSDTSYSEQEDSEDEDAICPAVSCLQPEGDEVDWVQCDGSCNQWFHQVCVGVSPEMAEKEDYICVRCTVKDAPSRK

SEQ ID NO: 463 - protein, 1560 aa, Homo sapiens
MEPGSDDFLPPPECPVFEPSWAEFRDPLGYIAKIRPIAEKSGICKIRPPADWQPPFAVEVDNFRFTPRIQRLNELEAQTRVKLNYLDQIAKFWEIQGSSLKIPNVERRILDLYSLSKIVVEEGGYEAICKDRRWARVAQRLNYPPGKNIGSLLRSHYERIVYPYEMYQSGANLVQCNTRPFDNEEKDKEYKPHSIPLRQSVQPSKFNSYGRRAKRLQPDPEPTEEDIEKNPELKKLQIYGAGPKMMGLGLMAKDKTLRKKDKEGPECPPTVVVKEELGGDVKVESTSPKTFLESKEELSHSPEPCTKMTMRLRRNHSNAQFIESYVCRMCSRGDEDDKLLLCDGCDDNYHIFCLLPPLPEIPKGVWRCPKCVMAECKRPPEAFGFEQATREYTLQSFGEMADSFKADYFNMPVHMVPTELVEKEFWRLVNSIEEDVTVEYGADIHSKEFGSGFPVSDSKRHLTPEEEEYATSGWNLNVMPVLEQSVLCHINADISGMKVPWLYVGMVFSAFCWHIEDHWSYSINYLHWGEPKTWYGVPSLAAEHLEEVMKKLTPELFDSQPDLLHQLVTLMNPNTLMSHGVPVVRTNQCAGEFVITFPRAYHSGFNQGYNFAEAVNFCTADWLPAGRQCIEHYRRLRRYCVFSHEELICKMAACPEKLDLNLAAAVHKEMFIMVQEERRLRKALLEKGITEAEREAFELLPDDERQCIKCKTTCFLSALACYDCPDGLVCLSHINDLCKCSSSRQYLRYRYTLDELPAMLHKLKVRAESFDTWANKVRVALEVEDGRKRSLEELRALESEARERRFPNSELLQQLKNCLSEAEACVSRALGLVSGQEAGPHRVAGLQMTLTELRAFLDQMNNLPCAMHQIGDVKGVLEQVEAYQAEAREALASLPSSPGLLQSLLERGRQLGVEVPEAQQLQRQVEQARWLDEVKRTLAPSARRGTLAVMRGLLVAGASVAPSPAVDKAQAELQELLTIAERWEEKAHLCLEARQKHPPATLEAIIREAENIPVHLPNIQALKEALAKARAWIADVDEIQNGDHYPCLDDLEGLVAVGRDLPVGLEELRQLELQVLTAHSWREKASKTFLKKNSCYTLLEVLCPCADAGSDSTKRSRWMEKELGLYKSDTELLGLSAQDLRDPGSVIVAFKEGEQKEKEGILQLRRTNSAKPSPLASSSTASSTTSICVCGQVLAGAGALQCDLCQDWFHGRCVSVPRLLSSPRPNPTSSPLLAWWEWDTKFLCPLCMRSRRPRLETILALLVALQRLPVRLPEGEALQCLTERAISWQGRARQALASEDVTALLGRLAELRQRLQAEPRPEEPPNYPAAPASDPLREGSGKDMPKVQGLLENGDSVTSPEKVAPEEGSGKRDLELLSSLLPQLTGPVLELPEATRAPLEELMMEGDLLEVTLDENHSIWQLLQAGQPPDLERIRTLLELEKAERHGSRARGRALERRRRRKVDRGGEGDDPAREELEPKRVRSSGPEAEEVQEEEELEEETGGEGPPAPIPTTGSPSTQENQNGLEPAEGTTSGPSAPFSTLTPRLHLPCPQQPPQQQL

SEQ ID NO: 464 - protein, 1682 aa, Homo sapiens
MHRAVDPPGARAAREAFALGGLSCAGAWSSCPPHPPPRSAWLPGGRCSASIGQPPLPAPLPPSHGSSSGHPSKPYYAPGAPTPRPLHGKLESLHGCVQALLREPAQPGLWEQLGQLYESEHDSEEATRCYHSALRYGGSFAELGPRIGRLQQAQLWNFHTGSCQHRAKVLPPLEQVWNLLHLEHKRNYGAKRGGPPVKRAAEPPVVQPVPPAALSGPSGEEGLSPGGKRRRGCNSEQTGLPPGLPLPPPPLPPPPPPPPPPPPPLPGLATSPPFQLTKPGLWSTLHGDAWGPERKGSAPPERQEQRHSLPHPYPYPAPAYTAHPPGHRLVPAAPPGPGPRPPGAESHGCLPATRPPGSDLRESRVQRSRMDSSVSPAATTACVPYAPSRPPGLPGTTTSSSSSSSSNTGLRGVEPNPGIPGADHYQTPALEVSHHGRLGPSAHSSRKPFLGAPAATPHLSLPPGPSSPPPPPCPRLLRPPPPPAWLKGPACRAAREDGEILEELFFGTEGPPRPAPPPLPHREGFLGPPASRFSVGTQDSHTPPTPPTPTTSSSNSNSGSHSSSPAGPVSFPPPPYLARSIDPLPRPPSPAQNPQDPPLVPLTLALPPAPPSSCHQNTSGSFRRPESPRPRVSFPKTPEVGPGPPPGPLSKAPQPVPPGVGELPARGPRLFDFPPTPLEDQFEEPAEFKILPDGLANIMKMLDESIRKEEEQQQHEAGVAPQPPLKEPFASLQSPFPTDTAPTTTAPAVAVTTTTTTTTTTTATQEEEKKPPPALPPPPPLAKFPPPSQPQPPPPPPPSPASLLKSLASVLEGQKYCYRGTGAAVSTRPGPLPTTQYSPGPPSGATALPPTSAAPSAQGSPQPSASSSSQFSTSGGPWARERRAGEEPVPGPMTPTQPPPPLSLPPARSESEVLEEISRACETLVERVGRSATDPADPVDTAEPADSGTERLLPPAQAKEEAGGVAAVSGSCKRRQKEHQKEHRRHRRACKDSVGRRPREGRAKAKAKVPKEKSRRVLGNLDLQSEEIQGREKSRPDLGGASKAKPPTAPAPPSAPAPSAQPTPPSASVPGKKAREEAPGPPGVSRADMLKLRSLSEGPPKELKIRLIKVESGDKETFIASEVEERRLRMADLTISHCAADVVRASRNAKVKGKFRESYLSPAQSVKPKINTEEKLPREKLNPPTPSIYLESKRDAFSPVLLQFCTDPRNPITVIRGLAGSLRLNLGLFSTKTLVEASGEHTVEVRTQVQQPSDENWDLTGTRQIWPCESSRSHTTIAKYAQYQASSFQESLQEEKESEDEESEEPDSTTGTPPSSAPDPKNHHIIKFGTNIDLSDAKRWKPQLQELLKLPAFMRVTSTGNMLSHVGHTILGMNTVQLYMKVPGSRTPGHQENNNFCSVNINIGPGDCEWFAVHEHYWETISAFCDRHGVDYLTGSWWPILDDLYASNIPVYRFVQRPGDLVWINAGTVHWVQATGWCNNIAWNVGPLTAYQYQLALERYEWNEVKNVKSIVPMIHVSWNVARTVKISDPDLFKMIKFCLLQSMKHCQVQRESLVRAGKKIAYQGRVKDEPAYYCNECDVEVFNILFVTSENGSRNTYLVHCEGCARRRSAGLQGVVVLEQYRTEELAQAYDAFTLVRARRARGQRRRALGQAAGTGFGSPAAPFPEPPPAFSPQAPASTSR

SEQ ID NO: 465 - protein, 349 aa, Homo sapiens
MEEEKYLPELMAEKDSLDPSFVHASRLLAEEIEKFQGSDGKKEDEEKKYLDVISNKNIKLSERVLIPVKQYPKFNFVGKLLGPRGNSLKRLQEETGAKMSILGKGSMRDKAKEEELRKSGEAKYAHLSDELHVLIEVFAPPGEAYSRMSHALEEIKKFLVPDYNDEIRQEQLRELSYLNGSEDSGRGRGIRGRGIRIAPTAPSRGRGGAIPPPPPPGRGVLTPRGSTVTRGALPVPPVARGVPTPRARGAPTVPGYRAPPPPAHEAYEEYGYDDGYGGEYDDQTYETYDNSYATQTQSVPEYYDYGHGVSEDAYDSYAPEEWATTRSSLKAPPQRSARGGYREHPYGRY

SEQ ID NO: 466 - protein, 346 aa, Homo sapiens
MEEKYLPELMAEKDSLDPSFTHALRLVNQEIEKFQKGEGKDEEKYIDVVINKNMKLGQKVLIPVKQFPKFNFVGKLLGPRGNSLKRLQEETLTKMSILGKGSMRDKAKEEELRKSGEAKYFHLNDDLHVLIEVFAPPAEAYARMGHALEEIKKFLIPDYNDEIRQAQLQELTYLNGGSENADVPVVRGKPTLRTRGVPAPAITRGRGGVTARPVGVVVPRGTPTPRGVLSTRGPVSRGRGLLTPRARGVPPTGYRPPPPPPTQETYGEYDYDDGYGTAYDEQSYDSYDNSYSTPAQSGADYYDYGHGLSEETYDSYGQEEWTNSRHKAPSARTAKGVYRDQPYGRY

SEQ ID NO: 467 - protein, 787 aa, Homo sapiens
MGDPGSEIIESVPPAGPEASESTTDENEDDIQFVSEGPSRPVLEYIDLVCGDDENPSAYYSDILFPKMPKRQGDFLHFLNVKKVKTDTENNEVSKNHCRLSKAKEPHFEYIEQPIIEEKPSLSSKKEIDNLVLPDCWNEKQAFMFTEQYKWLEIKEGKLGCKDCSAVRHLGSKAEKHVHVSKEWIAYLVTPNGSNKTTRQASLRKKIREHDVSKAHGKIQDLLKESTNDSICNLVHKQNNKNIDATVKVFNTVYSLVKHNRPLSDIEGARELQEKNGEVNCLNTRYSATRIAEHIAKEMKMKIFKNIIEENAKICIIIDEASTVSKKTTLVIYLQCTIQSAPAPVMLFVALKELVSTIAECIVNTLLTTLNDCGFTNEYLKANLIAFCSDGANTILGRKSGVATKLLENFPEIIIWNCLNHRLQLSLDDSISEIKQINHLKIFIDKIYSIYHQPNKNQTKLLGTVAKELETEIIKIGRVMGPRWAACSLQAATAVWHAYPILYMHFSHSYSGLAKRLANINFLQDLALMIDILEEFSVLSTALQSRSTNIKKAQKLIKRTIRALENLKIGTGKYESQIEDLIKSDKFKDIPFNKNNKFNALPRSILLDNIIQHMNLRLLSDRNHEDIFNYFDLLEPSTWPYEEITSPWIAGEKTLFHLCKILKYEVDLNDFREFVNNNIKSNNVSIPTTIYKAKKIVSTIAINSAEAERGFNLMNIICTRVRNSLTIDHVSDLMTINLLGKELADWDATPFVKSWSNCNHRLATDTRVRQKSTKVFHENQLAIWNLK

SEQ ID NO: 468 - protein, 1516 aa, Homo sapiens
MDNQQDKAIVASANGENTLINGVKENDSEDQDVAMKSFAALEAAAPIQPTPVAQKETLMYPRGLLPLPSKKPCMQSPPSPLGLIEAPEHAANSASVNAISLTSGIAKGLNTWSLPNECEKAPFAIMEPAGMSALNGDCLMQPSRTCLGCFMESKDAVDPEPGISLKVGDLNRDYETCAVSDIGIQCINAGENMKYGEQLLSDQLLGFPLHKSRAGDRRETEKPDIDLEDPAQKSYYEALLLDKCNTEEALLANSNQDWGYFETFISESKIELLDLCSKNELSVNLFSEEDVDNYMFDDDESTLGSDVCSLKIRYESFQDNVRDKTTLLMQEDAQFNFFPSVFTTCPKRESKSGALKQSSDFSQFKVPDVSIIWGEEDKNLDKKKGKEEGQEDKGVEKKDGKDNGEKPALNKPCSGTEVEQLKNPKQGHLANSLETSGSFSDDSSFIEISYDAMGEIKDCSRYMARDTNSGSSSSQQNYGLRAKRKVRYSEDYLYDVDSLEGEKVNERKEWLPVGSKEEDDDEWCPKKRRKVTRKEPPVIIKYIIINRFKGEKNMLVKLGKVDASETTVNLSENQLNKYAKLAPLKGFWQKKKKQRNTNTDSIKTPFSQKQSFEPGSFEVSFLPPARKRKSKLGNRHRIQRIPSIEISASSKQISLCNDQRHASNHKEDGGLKGTLKSAPLGAPSCANGSHLNDITGPDSVKVKAQDTEFKGPERKVLNKIKFKSEARLKSKKVKAAGQESKPIVQMSPLLENQSSKANLKNEVIPGTSNSSRLSEFHEAKAAKSSTFLPTTCSSEMPLSSANVTTNIPVIPGGYLQTLLDASDLSNNTSISYFSHHSPEQNEGSLTQTEKSFVPLQPTQDCVLTSSSDSELQQSSHNFKMESSNYRNVWPNKATSGTQEFMAEVSREIAPTQSSEFGASQVVSMENNLTPTTYNPICLNSGGSNCNKVLYDSMQDTQLPSDDSYQLCHFNNGEICFPFQQGPVNMDDGRLFSFDSMAPLSVSSSNYCSLSLKSCEKDGDDDITDDFLAHCSPKLVIQQSIDEIAPLKESTDLLDISNFTPDKFRHSSLSEMSPPDTPSLSPQITRCESMKTLGTLKGFQEGVPGPLDSVEKIKWDCSTLSRQVQMEDGFTLNNHQFQFHMFNDEDSVSLLQKNPCLSTFNDPSGQISTNNKVSKSRKKSSPSKSGAMNQSSSQKNTRKKSLKGNNKGIEKPPGKNSRQVPKSTKKGKYMAAINGEKMQIGIGRGGSQTNTISSTGKTLAECIQHGGPMASMKMPSQKGLSGDWALGKESSPGWSDMSMGTNTNSLLDDDQREFQEPSYILSNIASGMADVQRFMMASIEPLWEPMEHHGDPNIFYSPESNSLKLKTLKILAGTPQESKKKINSGSQGATKNHRSIKGVSKSNGKTAIGDPGRANMPGYNEDSRSTFFDKKYSNMSTLGNNGPTHKKLYRHKSSSKALRDEKCKGKHMEREQVHKDESGTASFEKLRDSDYNLLKAETTFWVLPVFEEETRIFQKDI

SEQ ID NO: 469 - protein, 1826 aa, Homo sapiens
MGDSKVKVAVRIRPMNRRETDLHTKCVVDVDANKVILNPVNTNLSKGDARGQPKVFAYDHCFWSMDESVKEKYAGQDIVFKCLGENILQNAFDGYNACIFAYGQTGSGKSYTMMGTADQPGLIPRLCSGLFERTQKEENEEQSFKVEVSYMEIYNEKVRDLLDPKGSRQTLKVREHSVLGPYVDGLSKLAVTSYKDIESLMSEGNKSRTVAATNMNEESSRSHAVFKITLTHTLYDVKSGTSGEKVGKLSLVDLAGSERATKTGAAGDRLKEGSNINKSLTTLGLVISALADQSAGKNKNKFVPYRDSVLTWLLKDSLGGNSKTAMVATVSPAADNYDETLSTLRYADRAKHIVNHAVVNEDPNARIIRDLREEVEKLREQLTKAEAMKSPELKDRLEESEKLIQEMTVTWEEKLRKTEEIAQERQKQLESLGISLQSSGIKVGDDKCFLVNLNADPALNELLVYYLKEHTLIGSANSQDIQLCGMGILPEHCIIDITSEGQVMLTPQKNTRTFVNGSSVSSPIQLHHGDRILWGNNHFFRLNLPKKKKKAEREDEDQDPSMKNENSSEQLDVDGDSSSEVSSEVNFNYEYAQMEVTMKALGSNDPMQSILNSLEQQHEEEKRSALERQRLMYEHELEQLRRRLSPEKQNCRSMDRFSFHSPSAQQRLRQWAEEREATLNNSLMRLREQIVKANLLVREANYIAEELDKRTEYKVTLQIPASSLDANRKRGSLLSEPAIQVRRKGKGKQIWSLEKLDNRLLDMRDLYQEWKECEEDNPVIRSYFKRADPFYDEQENHSLIGVANVFLESLFYDVKLQYAVPIINQKGEVAGRLHVEVMRLSGDVGERIAGGDEVAEVSFEKETQENKLVCMVKILQATGLPQHLSHFVFCKYSFWDQQEPVIVAPEVDTSSSSVSKEPHCMVVFDHCNEFSVNITEDFIEHLSEGALAIEVYGHKINDPRKNPALWDLGIIQAKTRSLRDRWSEVTRKLEFWVQILEQNENGEYCPVEVISAKDVPTGGIFQLRQGQSRRVQVEVKSVQESGTLPLMEECILSVGIGCVKVRPLRAPRTHETFHEEEEDMDSYQDRDLERLRRKWLNALTKRQEYLDQQLQKLVSKRDKTEDDADREAQLLEMRLTLTEERNAVMVPSAGSGIPGAPAEWTPVPGMETHIPVIFLDLNADDFSSQDNLDDPEAGGWDATLTGEEEEEFFELQIVKQHDGEVKAEASWDSAVHGCPQLSRGTPVDERLFLIVRVTVQLSHPADMQLVLRKRICVNVHGRQGFAQSLLKKMSHRSSIPGCGVTFEIVSNIPEDAQGVEEREALARMAANVENPASADSEAYIEKYLRSVLAVENLLTLDRLRQEVAVKEQLTGKGKLSRRSISSPNVNRLSGSRQDLIPSYSLGSNKGRWESQQDVSQTTVSRGIAPAPALSVSPQNNHSPDPGLSNLAASYLNPVKSFVPQMPKLLKSLFPVRDEKRGKRPSPLAHQPVPRIMVQSASPDIRVTRMEEAQPEMGPDVLVQTMGAPALKICDKPAKVPSPPPVIAVTAVTPAPEAQDGPPSPLSEASSGYFSHSVSTATLSDALGPGLDAAAPPGSMPTAPEAEPEAPISHPPPPTAVPAEEPPGPQQLVSPGRERPDLEAPAPGSPFRVRRVRASELRSFSRMLAGDPGCSPGAEGNAPAPGAGGQALASDSEEADEVPEWLREGEFVTVGAHKTGVVRYVGPADFQEGTWVGVELDLPSGKNDGSIGGKQYFRCNPGYGLLVRPSRVRRATGPVRRRSTGLRLGAPEARRSATLSGSATNLASLTAALAKADRSHKNPENRKSWAS

SEQ ID NO: 470 - protein, 957 aa, Homo sapiens
MADPAECSIKVMCRFRPLNEAEILRGDKFIPKFKGDETVVIGQGKPYVFDRVLPPNTTQEQVYNACAKQIVKDVLEGYNGTIFAYGQTSSGKTHTMEGKLHDPQLMGIIPRIAHDIFDHIYSMDENLEFHIKVSYFEIYLDKIRDLLDVSKTNLAVHEDKNRVPYVKGCTERFVSSPEEVMDVIDEGKANRHVAVTNMNEHSSRSHSIFLINIKQENVETEKKLSGKLYLVDLAGSEKVSKTGAEGAVLDEAKNINKSLSALGNVISALAEGTKTHVPYRDSKMTRILQDSLGGNCRTTIVICCSPSVFNEAETKSTLMFGQRAKTIKNTVSVNLELTAEEWKKKYEKEKEKNKTLKNVIQHLEMELNRWRNGEAVPEDEQISAKDQKNLEPCDNTPIIDNIAPVVAGISTEEKEKYDEEISSLYRQLDDKDDEINQQSQLAEKLKQQMLDQDELLASTRRDYEKIQEELTRLQIENEAAKDEVKEVLQALEELAVNYDQKSQEVEDKTRANEQLTDELAQKTTTLTTTQRELSQLQELSNHQKKRATEILNLLLKDLGEIGGIIGTNDVKTLADVNGVIEEEFTMARLYISKMKSEVKSLVNRSKQLESAQMDSNRKMNASERELAACQLLISQHEAKIKSLTDYMQNMEQKRRQLEESQDSLSEELAKLRAQEKMHEVSFQDKEKEHLTRLQDAEEMKKALEQQMESHREAHQKQLSRLRDEIEEKQKIIDEIRDLNQKLQLEQEKLSSDYNKLKIEDQEREMKLEKLLLLNDKREQAREDLKGLEETVSRELQTLHNLRKLFVQDLTTRVKKSVELDNDDGGGSAAQKQKISFLENNLEQLTKVHKQLVRDNADLRCELPKLEKRLRATAERVKALESALKEAKENAMRDRKRYQQEVDRIKEAVRAKNMARRAHSAQIAKPIRPGHYPASSPTAVHAIRGGGGSSSNSTHYQK

SEQ ID NO: 471 - skipped

SEQ ID NO: 472 - protein, 778 aa, Homo sapiens
MKPFQLDLLFVCFFLFSQELGLQKRGCCLVLGYMAKDKFRRMNEGQVYSFSQQPQDQVVVSGQPVTLLCAIPEYDGFVLWIKDGLALGVGRDLSSYPQYLVVGNHLSGEHHLKILRAELQDDAVYECQAIQAAIRSRPARLTVLVPPDDPVILGGPVISLRAGDPLNLTCHADNAKPAASIIWLRKGEVINGATYSKTLLRDGKRESIVSTLFISPGDVENGQSIVCRATNKAIPGGKETSVTIDIQHPPLVNLSVEPQPVLEDNVVTFHCSAKANPAVTQYRWAKRGQIIKEASGEVYRTTVDYTYFSEPVSCEVTNALGSTNLSRTVDVYFGPRMTTEPQSLLVDLGSDAIFSCAWTGNPSLTIVWMKRGSGVVLSNEKTLTLKSVRQEDAGKYVCRAVVPRVGAGEREVTLTVNGPPIISSTQTQHALHGEKGQIKCFIRSTPPPDRIAWSWKENVLESGTSGRYTVETISTEEGVISTLTISNIVRADFQTIYNCTAWNSFGSDTEIIRLKEQGSEMKSGAGLEAESVPMAVIIGVAVGAGVAFLVLMATIVAFCCARSQRNLKGVVSAKNDIRVEIVHKEPASGREGEEHSTIKQLMMDRGEFQQDSVLKQLEVLKEEEKEFQNLKDPTNGYYSVNTFKEHHSTPTISLSSCQPDLRPAGKQRVPTGMSFTNIYSTLSGQGRLYDYGQRFVLGMGSSSIELCEREFQRGSLSDSSSFLDTQCDSSVSSSGKQDGYVQFDKASKASASSSHHSQSSSQNSDPSRPLQRRMQTHV

SEQ ID NO: 473 - protein, 976 aa, Homo sapiens [sequence omitted]

SEQ ID NO: 474 - protein, 622 aa, Homo sapiens
MAMMVFPREEKLSQDEIVLGTKAVIQGLETLRGEHRALLAPLVAPEAGEAEPGSQERCILLRRSLEAIELGLGEAQVILALSSHLGAVESEKQKLRAQVRRLVQENQWLREELAGTQQKLQRSEQAVAQLEEEKQHLLFMSQIRKLDEDASPNEEKGDVPKDTLDDLFPNEDEQSPAPSPGGGDVSGQHGGYEIPARLRTLHNLVIQYASQGRYEVAVPLCKQALEDLEKTSGHDHPDVATMLNILALVYRDQNKYKEAAHLLNDALAIREKTLGKDHPAVAATLNNLAVLYGKRGKYKEAEPLCKRALEIREKVLGKFHPDVAKQLSNLALLCQNQGKAEEVEYYYRRALEIYATRLGPDDPNVAKTKNNLASCYLKQGKYQDAETLYKEILTRAHEKEFGSVNGDNKPIWMHAEEREESKDKRRDSAPYGEYGSWYKACKVDSPTVNTTLRSLGALYRRQGKLEAAHTLEDCASRNRKQGLDPASQTKVVELLKDGSGRRGDRRSSRDMAGGAGPRSESDLEDVGPTAEWNGDGSGSLRRSGSFGKLRDALRRSSEMLVKKLQGGTPQEPPNPRMKRASSLNFLNKSVEEPTQPGGTGLSDSRTLSSSSMDLSRRSSLVG

SEQ ID NO: 475 - protein, 486 aa, Homo sapiens
MDSSVIQRKKVAVIGGGLVGSLQACFLAKRNFQIDVYEAREDTRVATFTRGRSINLALSHRGRQALKAVGLEDQIVSQGIPMRARMIHSLSGKKSAIPYGTKSQYILSVSRENLNKDLLTAAEKYPNVKMHFNHRLLKCNPEEGMITVLGSDKVPKDVTCDLIVGCDGAYSTVRSHLMKKPRFDYSQQYIPHGYMELTIPPKNGDYAMEPNYLHIWPRNTFMMIALPNMNKSFTCTLFMPFEEFEKLLTSNDVVDFFQKYFPDAIPLIGEKLLVQDFFLLPAQPMISVKCSSFHFKSHCVLLGDAAHAIVPFFGQGMNAGFEDCLVFDELMDKFSNDLSLCLPVFSRLRIPDDHAISDLSMYNYIEMRAHVNSSWFIFQKNMERFLHAIMPSTFIPLYTMVTFSRIRYHEAVQRWHWQKKVINKGLFFLGSLIAISSTYLLIHYMSPRSFLRLRRPWNWIAHFRNTTCFPAKAVDSLEQISNLISR

SEQ ID NO: 476 - protein, 3969 aa, Homo sapiens
MAHSCRWRFPARPGTTGGGGGGGRRGLGGAPRQRVPALLLPPGPPVGGGGPGAPPSPPAVAAAAAAAGSSGAGVPGGAAAASAASSSSASSSSSSSSSASSGPALLRVGPGFDAALQVSAAIGTNLRRFRAVFGESGGGGGSGEDEQFLGFGSDEEVRVRSPTRSPSVKTSPRKPRGRPRSGSDRNSAILSDPSVFSPLNKSETKSGDKIKKKDSKSIEKKRGRPPTFPGVKIKITHGKDISELPKGNKEDSLKKIKRTPSATFQQATKIKKLRAGKLSPLKSKFKTGKLQIGRKGVQIVRRRGRPPSTERIKTPSGLLINSELEKPQKVRKDKEGTPPLTKEDKTVVRQSPRRIKPVRIIPSSKRTDATIAKQLLQRAKKGAQKKIEKEAAQLQGRKVKTQVKNIRQFIMPVVSAISSRIIKTPRRFIEDEDYDPPIKIARLESTPNSRFSAPSCGSSEKSSAASQHSSQMSSDSSRSSSPSVDTSTDSQASEEIQVLPEERSDTPEVHPPLPISQSPENESNDRRSRRYSVSERSFGSRTTKKLSTLQSAPQQQTSSSPPPPLLTPPPPLQPASSISDHTPWLMPPTIPLASPFLPASTAPMQGKRKSILREPTFRWTSLKHSRSEPQYFSSAKYAKEGLIRKPIFDNFRPPPLTPEDVGFASGFSASGTAASARLFSPLHSGTRFDMHKRSPLLRAPRFTPSEAHSRIFESVTLPSNRTSAGTSSSGVSNRKRKRKVFSPIRSEPRSPSHSMRTRSGRLSSSELSPLTPPSSVSSSLSISVSPLATSALNPTFTFPSHSLTQSGESAEKNQRPRKQTSAPAEPFSSSSPTPLFPWFTPGSQTERGRNKDKAPEELSKDRDADKSVEKDKSRERDREREKENKRESRKEKRKKGSEIQSSSALYPVGRVSKEKVVGEDVATSSSAKKATGRKKSSSHDSGTDITSVTLGDTTAVKTKILIKKGRGNLEKTNLDLGPTAPSLEKEKTLCLSTPSSSTVKHSTSSIGSMLAQADKLPMTDKRVASLLKKAKAQLCKIEKSKSLKQTDQPKAQGQESDSSETSVRGPRIKHVCRRAAVALGRKRAVFPDDMPTLSALPWEEREKILSSMGNDDKSSIAGSEDAEPLAPPIKPIKPVTRNKAPQEPPVKKGRRSRRCGQCPGCQVPEDCGVCTNCLDKPKFGGRNIKKQCCKMRKCQNLQWMPSKAYLQKQAKAVKKKEKKSKTSEKKDSKESSVVKNVVDSSQKPTPSAREDPAPKKSSSEPPPRKPVEEKSEEGNVSAPGPESKQATTPASRKSSKQVSQPALVIPPQPPTTGPPRKEVPKTTPSEPKKKQPPPPESGPEQSKQKKVAPRPSIPVKQKPKEKEKPPPVNKQENAGTLNILSTLSNGNSSKQKIPADGVHRIRVDFKEDCEAENVWEMGGLGILTSVPITPRVVCFLCASSGHVEFVYCQVCCEPFHKFCLEENERPLEDQLENWCCRRCKFCHVCGRQHQATKQLLECNKCRNSYHPECLGPNYPTKPTKKKKVWICTKCVRCKSCGSTTPGKGWDAQWSHDFSLCHDCAKLFAKGNFCPLCDKCYDDDDYESKMMQCGKCDRWVHSKCENLSDEMYEILSNLPESVAYTCVNCTERHPAEWRLALEKELQISLKQVLTALLNSRTTSHLLRYRQAAKPPDLNPETEESIPSRSSPEGPDPPVLTEVSKQDDQQPLDLEGVKRKMDQGNYTSVLEFSDDIVKIIQAAINSDGGQPEIKKANSMVKSFFIRQMERVFPWFSVKKSRFWEPNKVSSNSGMLPNAVLPPSLDHNYAQWQEREENSHTEQPPLMKKIIPAPKPKGPGEPDSPTPLHPPTPPILSTDRSREDSPELNPPPGIEDNRQCALCLTYGDDSANDAGRLLYIGQNEWTHVNCALWSAEVFEDDDGSLKNVHMAVIRGKQLRCEFCQKPGATVGCCLTSCTSNYHFMCSRAKNCVFLDDKKVYCQRHRDLIKGEVVPENGFEVFRRVFVDFEGISLRRKFLNGLEPENIHMMIGSMTIDCLGILNDLSDCEDKLFPIGYQCSRVYWSTTDARKRCVYTCKIVECRPPVVEPDINSTVEHDENRTIAHSPTSFTESSSKESQNTAEIISPPSPDRPPHSQTSGSCYYHVISKVPRIRTPSYSPTQRSPGCRPLPSAGSPTPTTHEIVTVGDPLLSSGLRSIGSRRHSTSSLSPQRSKLRIMSPMRTGNTYSRNNVSSVSTTGTATDLESSAKVVDHVLGPLNSSTSLGQNTSTSSNLQRTVVTVGNKNSHLDGSSSSEMKQSSASDLVSKSSSLKGEKTKVLSSKSSEGSAHNVAYPGIPKLAPQVHNTTSRELNVSKIGSFAEPSSVSFSSKEALSFPHLHLRGQRNDRDQHTDSTQSANSSPDEDTEVKTLKLSGMSNRSSIINEHMGSSSRDRRQKGKKSCKETFKEKHSSKSFLEPGQVTTGEEGNLKPEFMDEVLTPEYMGQRPCNNVSSDKIGDKGLSMPGVPKAPPMQVEGSAKELQAPRKRTVKVTLTPLKMENESQSKNALKESSPASPLQIESTSPTEPISASENPGDGPVAQPSPNNTSCQDSQSNNYQNLPVQDRNLMLPDGPKPQEDGSFKRRYPRRSARARSNMFFGLTPLYGVRSYGEEDIPFYSSSTGKKRGKRSAEGQVDGADDLSTSDEDDLYYYNFTRTVISSGGEERLASHNLFREEEQCDLPKISQLDGVDDGTESDTSVTATTRKSSQIPKRNGKENGTENLKIDRPEDAGEKEHVTKSSVGHKNEPKMDNCHSVSRVKTQGQDSLEAQLSSLESSRRVHTSTPSDKNLLDTYNTELLKSDSDNNNSDDCGNILPSDIMDFVLKNTPSMQALGESPESSSSELLNLGEGLGLDSNREKDMGLFEVFSQQLPTTEPVDSSVSSSISAEEQFELPLELPSDLSVLTTRSPTVPSQNPSRLAVISDSGEKRVTITEKSVASSESDPALLSPGVDPTPEGHMTPDHFIQGHMDADHISSPPCGSVEQGHGNNQDLTRNSSTPGLQVPVSPTVPIQNQKYVPNSTDSPGPSQISNAAVQTTPPHLKPATEKLIVVNQNMQPLYVLQTLPNGVTQKIQLTSSVSSTPSVMETNTSVLGPMGGGLTLTTGLNPSLPTSQSLFPSASKGLLPMSHHQHLHSFPAATQSSFPPNISNPPSGLLIGVQPPPDPQLLVSESSQRTDLSTTVATPSSGLKKRPISRLQTRKNKKLAPSSTPSNIAPSDVVSNMTLINFTPSQLPNHPSLLDLGSLNTSSHRTVPNIIKRSKSSIMYFEPAPLLPQSVGGTAATAAGTSTISQDTSHLTSGSVSGLASSSSVLNVVSMQTTTTPTSSASVPGHVTLTNPRLLGTPDIGSISNLLIKASQQSLGIQDQPVALPPSSGMFPQLGTSQTPSTAAITAASSICVLPSTQTTGITAASPSGEADEHYQLQHVNQLLASKTGIHSSQRDLDSASGPQVSNFTQTVDAPNSMGLEQNKALSSAVQASPTSPGGSPSSPSSGQRSASPSVPGPTKPKPKTKRFQLPLDKGNGKKHKVSHLRTSSSEAHIPDQETTSLTSGTGTPGAEAEQQDTASVEQSSQKECGQPAGQVAVLPEVQVTQNPANEQESAEPKTVEEEESNFSSPLMLWLQQEQKRKESITEKKPKKGLVFEISSDDGFQICAESIEDAWKSLTDKVQEARSNARLKQLSFAGVNGLRMLGILHDAVVFLIEQLSGAKHCRNYKFRFHKPEEANEPPLNPHGSARAEVHLRKSAFDMFNFLASKHRQPPEYNPNDEEEEEVQLKSARRATSMDLPMPMRFRHLKKTSKEAVGVYRSPIHGRGLFCKRNIDAGEMVIEYAGNVIRSIQTDKREKYYDSKGIGCYMFRIDDSEVVDATMHGNAARFINHSCEPNCYSRVINIDGQKHIVIFAMRKIYRGEELTYDYKFPIEDASNKLPCNCGAKKCRKFLN

SEQ ID NO: 477 - protein, 4911 aa, Homo sapiens
MSSEEDKSVEQPQPPPPPPEEPGAPAPSPAAADKRPRGRPRKDGASPFQRARKKPRSRGKTAVEDEDSMDGLETTETETIVETEIKEQSAEEDAEAEVDNSKQLIPTLQRSVSEESANSLVSVGVEAKISEQLCAFCYCGEKSSLGQGDLKQFRITPGFILPWRNQPSNKKDIDDNSNGTYEKMQNSAPRKQRGQRKERSPQQNIVSCVSVSTQTASDDQAGKLWDELSLVGLPDAIDIQALFDSTGTCWAHHRCVEWSLGVCQMEEPLLVNVDKAVVSGSTERCAFCKHLGATIKCCEEKCTQMYHYPCAAGAGTFQDFSHIFLLCPEHIDQAPERSKEDANCAVCDSPGDLLDQFFCTTCGQHYHGMCLDIAVTPLKRAGWQCPECKVCQNCKQSGEDSKMLVCDTCDKGYHTFCLQPVMKSVPTNGWKCKNCRICIECGTRSSSQWHHNCLICDNCYQQQDNLCPFCGKCYHPELQKDMLHCNMCKRWVHLECDKPTDHELDTQLKEEYICMYCKHLGAEMDRLQPGEEVEIAELTTDYNNEMEVEGPEDQMVFSEQAANKDVNGQESTPGIVPDAVQVHTEEQQKSHPSESLDTDSLLIAVSSQHTVNTELEKQISNEVDSEDLKMSSEVKHICGEDQIEDKMEVTENIEVVTHQITVQQEQLQLLEEPETVVSREESRPPKLVMESVTLPLETLVSPHEESISLCPEEQLVIERLQGEKEQKENSELSTGLMDSEMTPTIEGCVKDVSYQGGKSIKLSSETESSFSSSADISKADVSSSPTPSSDLPSHDMLHNYPSALSSSAGNIMPTTYISVTPKIGMGKPAITKRKFSPGRPRSKQGAWSTHNTVSPPSWSPDISEGREIFKPRQLPGSAIWSIKVGRGSGFPGKRRPRGAGLSGRGGRGRSKLKSGIGAVVLPGVSTADISSNKDDEENSMHNTVVLFSSSDKFTLNQDMCVVCGSFGQGAEGRLLACSQCGQCYHPYCVSIKITKVVLSKGWRCLECTVCEACGKATDPGRLLLCDDCDISYHTYCLDPPLQTVPKGGWKCKWCVWCRHCGATSAGLRCEWQNNYTQCAPCASLSSCPVCYRNYREEDLILQCRQCDRWMHAVCQNLNTEEEVENVADIGFDCSMCRPYMPASNVPSSDCCESSLVAQIVTKVKELDPPKTYTQDGVCLTESGMTQLQSLTVTVPRRKRSKPKLKLKIINQNSVAVLQTPPDIQSEHSRDGEMDDSREGELMDCDGKSESSPEREAVDDETKGVEGTDGVKKRKRKPYRPGIGGFMVRQRSRTGQGKTKRSVIRKDSSGSISEQLPCRDDGWSEQLPDTLVDESVSVTESTEKIKKRYRKRKNKLEETFPAYLQEAFFGKDLLDTSRQSKISLDNLSEDGAQLLYKTNMNTGFLDPSLDPLLSSSSAPTKSGTHGPADDPLADISEVLNTDDDILGIISDDLAKSVDHSDIGPVTDDPSSLPQPNVNQSSRPLSEEQLDGILSPELDKMVTDGAILGKLYKIPELGGKDVEDLFTAVLSPANTQPTPLPQPPPPTQLLPIHNQDAFSRMPLMNGLIGSSPHLPHNSLPPGSGLGTFSAIAQSSYPDARDKNSAFNPMASDPNNSWTSSAPTVEGENDTMSNAQRSTLKWEKEEALGEMATVAPVLYTNINFPNLKEEFPDWTTRVKQIAKLWRKASSQERAPYVQKARDNRAALRINKVQMSNDSMKRQQQQDSIDPSSRIDSELFKDPLKQRESEHEQEWKFRQQMRQKSKQQAKIEATQKLEQVKNEQQQQQQQQFGSQHLLVQSGSDTPSSGIQSPLTPQPGNGNMSPAQSFHKELFTKQPPSTPTSTSSDDVFVKPQAPPPPPAPSRIPIQDSLSQAQTSQPPSPQVFSPGSSNSRPPSPMDPYAKMVGTPRPPPVGHSFSRRNSAAPVENCTPLSSVSRPLQMNETTANRPSPVRDLCSSSTTNNDPYAKPPDTPRPVMTDQFPKSLGLSRSPVVSEQTAKGPIAAGTSDHFTKPSPRADVFQRQRIPDSYARPLLTPAPLDSGPGPFKTPMQPPPSSQDPYGSVSQASRRLSVDPYERPALTPRPIDNFSHNQSNDPYSQPPLTPHPAVNESFAHPSRAFSQPGTISRPTSQDPYSQPPGTPRPVVDSYSQSSGTARSNTDPYSQPPGTPRPTTVDPYSQQPQTPRPSTQTDLFVTPVTNQRHSDPYAHPPGTPRPGISVPYSQPPATPRPRISEGFTRSSMTRPVLMPNQDPFLQAAQNRGPALPGPLVRPPDTCSQTPRPPGPGLSDTFSRVSPSAARDPYDQSPMTPRSQSDSFGTSQTAHDVADQPRPGSEGSFCASSNSPMHSQGQQFSGVSQLPGPVPTSGVTDTQNTVNMAQADTEKLRQRQKLREIILQQQQQKKIAGRQEKGSQDSPAVPHPGPLQHWQPENVNQAFTRPPPPYPGNIRSPVAPPLGPRYAVFPKDQRGPYPPDVASMGMRPHGFRFGFPGGSHGTMPSQERFLVPPQQIQGSGVSPQLRRSVSVDMPRPLNNSQMNNPVGLPQHFSPQSLPVQQHNILGQAYIELRHRAPDGRQRLPFSAPPGSVVEASSNLRHGNFIPRPDFPGPRHTDPMRRPPQGLPNQLPVHPDLEQVPPSQQEQGHSVHSSSMVMRTLNHPLGGEFSEAPLSTSVPSETTSDNLQITTQPSDGLEEKLDSDDPSVKELDVKDLEGVEVKDLDDEDLENLNLDTEDGKVVELDTLDNLETNDPNLDDLLRSGEFDIIAYTDPELDMGDKKSMFNEELDLPIDDKLDNQCVSVEPKKKEQENKTLVLSDKHSPQKKSTVTNEVKTEVLSPNSKVESKCETEKNDENKDNVDTPCSQASAHSDLNDGEKTSLHPCDPDLFEKRTNRETAGPSANVIQASTQLPAQDVINSCGITGSTPVLSSLLANEKSDNSDIRPSGSPPPPTLPASPSNHVSSLPPFIAPPGRVLDNAMNSNVTVVSRVNHVFSQGVQVNPGLIPGQSTVNHSLGTGKPATQTGPQTSQSGTSSMSGPQQLMIPQTLAQQNRERPLLLEEQPLLLQDLLDQERQEQQQQRQMQAMIRQRSEPFFPNIDFDAITDPIMKAKMVALKGINKVMAQNNLGMPPMVMSRFPFMGQVVTGTQNSEGQNLGPQAIPQDGSITHQISRPNPPNFGPGFVNDSQRKQYEEWLQETQQLLQMQQKYLEEQIGAHRKSKKALSAKQRTAKKAGREFPEEDAEQLKHVTEQQSMVQKQLEQIRKQQKEHAELIEDYRIKQQQQCAMAPPTMMPSVQPQPPLIPGATPPTMSQPTFPMVPQQLQHQQHTTVISGHTSPVRMPSLPGWQPNSAPAHLPLNPPRIQPPIAQLPIKTCTPAPGTVSNANPQSGPPPRVEFDDNNPFSESFQERERKERLREQQERQRIQLMQEVDRQRALQQRMEMEQHGMVGSEISSSRTSVSQIPFYSSDLPCDFMQPLGPLQQSPQHQQQMGQVLQQQNIQQGSINSPSTQTFMQTNERRQVGPPSFVPDSPSIPVGSPNFSSVKQGHGNLSGTSFQQSPVRPSFTPALPAAPPVANSSLPCGQDSTITHGHSYPGSTQSLIQLYSDIIPEEKGKKKRTRKKKRDDDAESTKAPSTPHSDITAPPTPGISETTSTPAVSTPSELPQQADQESVEPVGPSTPNMAAGQLCTELENKLPNSDFSQATPNQQTYANSEVDKLSMETPAKTEEIKLEKAETESCPGQEEPKLEEQNGSKVEGNAVACPVSSAQSPPHSAGAPAAKGDSGNELLKHLLKNKKSSSLLNQKPEGSICSEDDCTKDNKLVEKQNPAEGLQTLGAQMQGGFGCGNQLPKTDGGSETKKQRSKRTQRTGEKAAPRSKKRKKDEEEKQAMYSSTDTFTHLKQQNNLSNPPTPPASLPPTPPPMACQKMANGFATTEELAGKAGVLVSHEVTKTLGPKPFQLPFRPQDDLLARALAQGPKTVDVPASLPTPPHNNQEELRIQDHCGDRDTPDSFVPSSSPESVVGVEVSRYPDLSLVKEEPPEPVPSPIIPILPSTAGKSSESRRNDIKTEPGTLYFASPFGPSPNGPRSGLISVAITLHPTAAENISSVVAAFSDLLHVRIPNSYEVSSAPDVPSMGLVSSHRINPGLEYRQHLLLRGPPPGSANPPRLVSSYRLKQPNVPFPPTSNGLSGYKDSSHGIAESAALRPQWCCHCKVVILGSGVRKSFKDLTLLNKDSRESTKRVEKDIVFCSNNCFILYSSTAQAKNSENKESIPSLPQSPMRETPSKAFHQYSNNISTLDVHCLPQLPEKASPPASPPIAFPPAFEAAQVEAKPDELKVTVKLKPRLRAVHGGFEDCRPLNKKWRGMKWKKWSIHIVIPKGTFKPPCEDEIDEFLKKLGTSLKPDPVPKDYRKCCFCHEEGDGLTDGPARLLNLDLDLWVHLNCALWSTEVYETQAGALINVELALRRGLQMKCVFCHKTGATSGCHRFRCTNIYHFTCAIKAQCMFFKDKTMLCPMHKPKGIHEQELSYFAVFRRVYVQRDEVRQIASIVQRGERDHTFRVGSLIFHTIGQLLPQQMQAFHSPKALFPVGYEASRLYWSTRYANRRCRYLCSIEEKDGRPVFVIRIVEQGHEDLVLSDISPKGVWDKILEPVACVRKKSEMLQLFPAYLKGEDLFGLTVSAVARIAESLPGVEACENYTFRYGRNPLMELPLAVNPTGCARSEPKMSAHVKRFVLRPHTLNSTSTSKSFQSTVTGELNAPYSKQFVHSKSSQYRKMKTEWKSNVYLARSRIQGLGLYAARDIEKHTMVIEYIGTIIRNEVANRKEKLYESQNRGVYMFRMDNDHVIDATLTGGPARYINHSCAPNCVAEVVTFERGHKIIISSSRRIQKGEELCYDYKFDFEDDQHKIPCHCGAVNCRKWMN

SEQ ID NO: 478 - protein, 1858 aa, Homo sapiens
MSIVIPLGVDTAETSYLEMAAGSEPESVEASPVVVEKSNSYPHQLYTSSSHHSHSYIGLPYADHNYGARPPPTPPASPPPSVLISKNEVGIFTTPNFDETSSATTISTSEDGSYGTDVTRCICGFTHDDGYMICCDKCSVWQHIDCMGIDRQHIPDTYLCERCQPRNLDKERAVLLQRRKRENMSDGDTSATESGDEVPVELYTAFQHTPTSITLTASRVSKVNDKRRKKSGEKEQHISKCKKAFREGSRKSSRVKGSAPEIDPSSDGSNFGWETKIKAWMDRYEEANNNQYSEGVQREAQRIALRLGNGNDKKEMNKSDLNTNNLLFKPPVESHIQKNKKILKSAKDLPPDALIIEYRGKFMLREQFEANGYFFKRPYPFVLFYSKFHGLEMCVDARTFGNEARFIRRSCTPNAEVRHEIQDGTIHLYIYSIHSIPKGTEITIAFDFDYGNCKYKVDCACLKENPECPVLKRSSESMENINSGYETRRKKGKKDKDISKEKDTQNQNITLDCEGTTNKMKSPETKQRKLSPLRLSVSNNQEPDFIDDIEEKTPISNEVEMESEEQIAERKRKMTREERKMEAILQAFARLEKREKRREQALERISTAKTEVKTECKDTQIVSDAEVIQEQAKEENASKPTPAKVNRTKQRKSFSRSRTHIGQQRRRHRTVSMCSDIQPSSPDIEVTSQQNDIENTVLTIEPETETALAEIITETEVPALNKCPTKYPKTKKHLVNEWLSEKNEKTGKPSDGLSERPLRITTDPEVLATQLNSLPGLTYSPHVYSTPKHYIRFTSPFLSEKRRRKEPTENISGSCKKRWLKQALEEENSAILHRFNSPCQERSRSPAVNGENKSPLLLNDSCSLPDLTTPLKKRRFYQLLDSVYSETSTPTPSPYATPTHTDITPMDPSFATPPRIKSDDETCRNGYKPIYSPVTPVTPGTPGNTMHFENISSPESSPEIKRRTYSQEGYDRSSTMLTLGPFRNSNLTELGLQEIKTIGYTSPRSRTEVNRQCPGEKEPVSDLQLGLDAVEPTALHKTLETPAHDRAEPNSQLDSTHSGRGTMYSSWVKSPDRTGVNFSVNSNLRDLTPSHQLEVGGGFRISESKCLMQDDTRGMFMETTVFCTSEDGLVSGFGRTVNDNLIDGNCTPQNPPQKKKVSLLEYRKRQREARKSGSKTENFPLISVSPHASGSLSNNGDGCASSNDNGEQVDHTASLPLPTPATVYNATSEETSNNCPVKDATASEKNEPEVQWTASTSVEQVRERSYQRALLLSDHRKDKDSGGESPCVSCSPSHVQSSPSSHSNHIPQLQAKGPVPSFSELMEDPDPENPEPTTTNECPSPDTSQNTCKSPPKMSKPGSPGSVIPAQAHGKIFTKPDPQWDSTVSASEAENGVHLKTELQQKQLSNNNQALSKNHPPQTHVRNSSEQLSQKLPSVPTKLHCPPSPHLENPPKSSTPHTPVQHGYLSPKPPSQQLGSPYRPHHSQSPQVGTPQREPQRNFYPAAQNLPANTQQATSGTLFTQTPSGQSSATYSQFNQQSLNSTAPPPPPPPPPSSSYYQNQQPSANFQNYNQLKGSLSQQTVFTSGPNQALPGTTSQQTVPGHHVTPGHFLPSQNPTIHHQTAAAVVPPPPPPPPAPGPHLVQQPNSHQQHSVAHVVGPVHAVTPGSHIHSQTAGHHLPPPPPPPGPAPHHHPPPHPSTGLQGLQAQHQHVVNSAPPPPPPPPPSSVLASGHHTTSAQALHHPPHQGPPLFPSSAHPTVPPYPSQATHHTTLGPGPQHQPSGTGPHCPLPVTGPHLQPQGPNSIPTPTASGFCPHPGSVALPHGVQGPQQASPVPGQIPIHRAQVPPTFQNNYHGSGWH

SEQ ID NO: 479 - protein, 885 aa, Homo sapiens
MKWLGESKNMVVNGRRNGGKLSNDHQQNQSKLQHTGKDTLKAGKNAVERRSNRCNGNSGFEGQSRYVPSSGMSAKELCENDDLATSLVLDPYLGFQTHKMNTSAFPSRSSRHFSKSDSFSHNNPVRFRPIKGRQEELKEVIERFKKDEHLEKAFKCLTSGEWARHYFLNKNKMQEKLFKEHVFIYLRMFATDSGFEILPCNRYSSEQNGAKIVATKEWKRNDKIELLVGCIAELSEIEENMLLRHGENDFSVMYSTRKNCAQLWLGPAAFINHDCRPNCKFVSTGRDTACVKALRDIEPGEEISCYYGDGFFGENNEFCECYTCERRGTGAFKSRVGLPAPAPVINSKYGLRETDKRLNRLKKLGDSSKNSDSQSVSSNTDADTTQEKNNATSNRKSSVGVKKNSKSRTLTRQSMSRIPASSNSTSSKLTHINNSRVPKKLKKPAKPLLSKIKLRNHCKRLEQKNASRKLEMGNLVLKEPKVVLYKNLPIKKDKEPEGPAQAAVASGCLTRHAAREHRQNPVRGAHSQGESSPCTYITRRSVRTRTNLKEASDIKLEPNTLNGYKSSVTEPCPDSGEQLQPAPVLQEEELAHETAQKGEAKCHKSDTGMSKKKSRQGKLVKQFAKIEESTPVHDSPGKDDAVPDLMGPHSDQGEHSGTVGVPVSYTDCAPSPVGCSVVTSDSFKTKDSFRTAKSKKKRRITRYDAQLILENNSGIPKLTLRRRHDSSSKTNDQENDGMNSSKISIKLSKDHDNDNNLYVAKLNNGFNSGSGSSSTKLKIQLKRDEENRGSYTEGLHENGVCCSDPLSLLESRMEVDDYSQYEEESTDDSSSSEGDEEEDDYDDDFEDDFIPLPPAKRLRLIVGKDSIDIDISSRRREDQSLRLNA

SEQ ID NO: 480 - protein, 436 aa, Homo sapiens
MMGEAAVAAGPCPLREDSFTRFSSQSNVYGLAGGAGGRGELLAATLKGKVLGFRYQDLRQKIRPVAKELQFNYIPVDAEIVSIDTFNKSPPKRGLVVGITFIKDSGDKGSPFLNIYCDYEPGSEYNLDSIAQSCLNLELQFTPFQLCHAEVQVGDQLETVFLLSGNDPAIHLYKENEGLHQFEEQPVENLFPELTNLTSSVLWLDVHNFPGTSRRLSALGCQSGYVRVAHVDQRSREVLQMWSVLQDGPISRVIVFSLSAAKETKDRPLQDEYSVLVASMLEPAVVYRDLLNRGLEDQLLLPGSDQFDSVLCSLVTDVDLDGRPEVLVATYGQELLCYKYRGPESGLPEAQHGFHLLWQRSFSSPLLAMAHVDLTGDGLQELAVVSLKGVHILQHSLIQASELVLTRLRHQVEQRRRRLQGLEDGAGAGPAENAAS

SEQ ID NO: 481 - protein, 381 aa, Homo sapiens
MASPSLERPEKGAGKSEFRNQKPKPENQDESELLTVPDGWKEPAFSKEDNPRGLLEESSFATLFPKYREAYLKECWPLVQKALNEHHVNATLDLIEGSMTVCTTKKTFDPYIIIRARDLIKLLARSVSFEQAVRILQDDVACDIIKIGSLVRNKERFVKRRQRLIGPKGSTLKALELLTNCYIMVQGNTVSAIGPFSGLKEVRKVVLDTMKNIHPIYNIKSLMIKRELAKDSELRSQSWERFLPQFKHKNVNKRKEPKKKTVKKEYTPFPPPQPESQIDKELASGEYFLKANQKKRQKMEAIKAKQAEAISKRQEERNKAFIPPKEKPIVKPKEASTETKIDVASIKEKVKKAKNKKLGALTAEEIALKMEADEKKKKKKK

SEQ ID NO: 482 - protein, 3075 aa, Homo sapiens
MRGGVLLVLLLCVAAQCRQRGLFPAILNLASNAHISTNATCGEKGPEMFCKLVEHVPGRPVRNPQCRICDGNSANPRERHPISHAIDGTNNWWQSPSIQNGREYHWVTITLDLRQVFQVAYVIIKAANAPRPGNWILERSLDGTTFSPWQYYAVSDSECLSRYNITPRRGPPTYRADDEVICTSYYSRLVPLEHGEIHTSLINGRPSADDLSPKLLEFTSARYIRLRLQRIRTLNADLMTLSHREPKELDPIVTRRYYYSIKDISVGGMCICYGHASSCPWDETTKKLQCQCEHNTCGESCNRCCPGYHQQPWRPGTVSSGNTCEACNCHNKAKDCYYDESVAKQKKSLNTAGQFRGGGVCINCLQNTMGINCETCIDGYYRPHKVSPYEDEPCRPCNCDPVGSLSSVCIKDDLHSDLHNGKQPGQCPCKEGYTGEKCDRCQLGYKDYPTCVSCGCNPVGSASDEPCTGPCVCKENVEGKACDRCKPGFYNLKEKNPRGCSECFCFGVSDVCSSLSWPVGQVNSMSGWLVTDLISPRKIPSQQDALGGRHQVSINNTAVMQRLAPKYYWAAPEAYLGNKLTAFGGFLKYTVSYDIPVETVDSNLMSHADVIIKGNGLTLSTQAEGLSLQPYEEYLNVVRLVPENFQDFHSKRQIDRDQLMTVLANVTHLLIRANYNSAKMALYRLESVSLDIASSNAIDLVVAADVEHCECPQGYTGTSCESCLSGYYRVDGILFGGICQPCECHGHAAECNVHGVCIACAHNTTGVHCEQCLPGFYGEPSRGTPGDCQPCACPLTIASNNFSPTCHLNDGDEVVCDWCAPGYSGAWCERCADGYYGNPTVPGESCVPCDCSGNVDPSEAGHCDSVTGECLKCLGNTDGAHCERCADGFYGDAVTAKNCRACECHVKGSHSAVCHLETGLCDCKPNVTGQQCDQCLHGYYGLDSGHGCRPCNCSVAGSVSDGCTDEGQCHCVPGVAGKRCDRCAHGFYAYQDGSCTPCDCPHTQNTCDPETGECVCPPHTQGVKCEECEDGHWGYDAEVGCQACNCSLVGSTHHRCDVVTGHCQCKSKFGGRACDQCSLGYRDFPDCVPCDCDLRGTSGDACNLEQGLCGCVEETGACPCKENVFGPQCNECREGTFALRADNPLGCSPCFCSGLSHLCSELEDYVRTPVTLGSDQPLLRVVSQSNLRGTTEGVYYQAPDFLLDAATVRQHIRAEPFYWRLPQQFQGDQLMAYGGKLKYSVAFYSLDGVGTSNFEPQVLIKGGRIRKQVIYMDAPAPENGVRQEQEVAMRENFWKYFNSVSEKPVTREDFMSVLSDIEYILIKASYGQGLQQSRISDISMEVGRKAEKLHPEEEVASLLENCVCPPGTVGFSCQDCAPGYHRGKLPAGSDRGPRPLVAPCVPCSCNNHSDTCDPNTGKCLNCGDNTAGDHCDVCTSGYYGKVTGSASDCALCACPHSPPASFSPTCVLEGDHDFRCDACLLGYEGKHCERCSSSYYGNPQTPGGSCQKCDCNPHGSVHGDCDRTSGQCVCRLGASGLRCDECEPRHILMETDCVSCDDECVGVLLNDLDEIGDAVLSLNLTGIIPVPYGILSNLENTTKYLQESLLKENMQKDLGKIKLEGVAEETDNLQKKLTRMLASTQKVNRATERIFKESQDLAIAIERLQMSITEIMEKTTLNQTLDEDFLLPNSTLQNMQQNGTSLLEIMQIRDFTQLHQNATLELKAAEDLLSQIQENYQKPLEELEVLKEAASHVLSKHNNELKAAEALVREAEAKMQESNHLLLMVNANLREFSDKKLHVQEEQNLTSELIVQGRGLIDAAAAQTDAVQDALEHLEDHQDKLLLWSAKIRHHIDDLVMHMSQRNAVDLVYRAEDHAAEFQRLADVLYSGLENIRNVSLNATSAAYVHYNIQSLIEESEELARDAHRTVTETSLLSESLVSNGKAAVQRSSRFLKEGNNLSRKLPGIALELSELRNKTNRFQENAVEITRQTNESLLILRAIPKGIRDKGAKTKELATSASQSAVSTLRDVAGLSQELLNTSASLSRVNTTLRETHQLLQDSTMATLLAGRKVKDVEIQANLLFDRLKPLKMLEENLSRNLSEIKLLISQARKQAASIKVAVSADRDCIRAYQPQISSTNYNTLTLNVKTQEPDNLLFYLGSSTASDFLAVEMRRGRVAFLWDLGSGSTRLEFPDFPIDDNRWHSIHVARFGNIGSLSVKEMSSNQKSPTKTSKSPGTANVLDVNNSTLMFVGGLGGQIKKSPAVKVTHFKGCLGEAFLNGKSIGLWNYIEREGKCRGCFGSSQNEDPSFHFDGSGYSVVEKSLPATVTQIIMLFNTFSPNGLLLYLGSYGTKDFLSIELFRGRVKVMTDLGSGPITLLTDRRYNNGTWYKIAFQRNRKQGVLAVIDAYNTSNKETKQGETPGASSDLNRLDKDPIYVGGLPRSRVVRRGVTTKSFVGCIKNLEISRSTFDLLRNSYGVRKGCLLEPIRSVSFLKGGYIELPPKSLSPESEWLVTFATTNSSGIILAALGGDVEKRGDREEAHVPFFSVMLIGGNIEVHVNPGDGTGLRKALLHAPTGTCSDGQAHSISLVRNRRIITVQLDENNPVEMKLGTLVESRTINVSNLYVGGIPEGEGTSLLTMRRSFHGCIKNLIFNLELLDFNSAVGHEQVDLDTCWLSERPKLAPDAEDSKLLPEPRAFPEQCVVDAALEYVPGAHQFGLTQNSHFILPFNQSAVRKKLSVELSIRTFASSGLIYYMAHQNQADYAVLQLHGGRLHFMFDLGKGRTKVSHPALLSDGKWHTVKTDYVKRKGFITVDGRESPMVTVVGDGTMLDVEGLFYLGGLPSQYQARKIGNITHSIPACIGDVTVNSKQLDKDSPVSAFTVNRCYAVAQEGTYFDGSGYAALVKEGYKVQSDVNITLEFRTSSQNGVLLGISTAKVDAIGLELVDGKVLFHVNNGAGRITAAYEPKTATVLCDGKWHTLQANKSKHRITLIVDGNAVGAESPHTQSTSVDTNNPIYVGGYPAGVKQKCLRSQTSFRGCLRKLALIKSPQVQSFDFSRAFELHGVFLHSCPGTES

SEQ ID NO: 483 - protein, 1786 aa, Homo sapiens
MGLLQLLAFSFLALCRARVRAQEPEFSYGCAEGSCYPATGDLLIGRAQKLSVTSTCGLHKPEPYCIVSHLQEDKKCFICNSQDPYHETLNPDSHLIENVVTTFAPNRLKIWWQSENGVENVTIQLDLEAEFHFTHLIMTFKTFRPAAMLIERSSDFGKTWGVYRYFAYDCEASFPGISTGPMKKVDDIICDSRYSDIEPSTEGEVIFRALDPAFKIEDPYSPRIQNLLKITNLRIKFVKLHTLGDNLLDSRMEIREKYYYAVYDMVVRGNCFCYGHASECAPVDGFNEEVEGMVHGHCMCRHNTKGLNCELCMDFYHDLPWRPAEGRNSNACKKCNCNEHSISCHFDMAVYLATGNVSGGVCDDCQHNTMGRNCEQCKPFYYQHPERDIRDPNFCERCTCDPAGSQNEGICDSYTDFSTGLIAGQCRCKLNVEGEHCDVCKEGFYDLSSEDPFGCKSCACNPLGTIPGGNPCDSETGHCYCKRLVTGQHCDQCLPEHWGLSNDLDGCRPCDCDLGGALNNSCFAESGQCSCRPHMIGRQCNEVEPGYYFATLDHYLYEAEEANLGPGVSIVERQYIQDRIPSWTGAGFVRVPEGAYLEFFIDNIPYSMEYDILIRYEPQLPDHWEKAVITVQRPGRIPTSSRCGNTIPDDDNQVVSLSPGSRYVVLPRPVCFEKGTNYTVRLELPQYTSSDSDVESPYTLIDSLVLMPYCKSLDIFTVGGSGDGVVTNSAWETFQRYRCLENSRSVVKTPMTDVCRNIIFSISALLHQTGLACECDPQGSLSSVCDPNGGQCQCRPNVVGRTCNRCAPGTFGFGPSGCKPCECHLQGSVNAFCNPVTGQCHCFQGVYARQCDRCLPGHWGFPSCQPCQCNGHADDCDPVTGECLNCQDYTMGHNCERCLAGYYGDPIIGSGDHCRPCPCPDGPDSGRQFARSCYQDPVTLQLACVCDPGYIGSRCDDCASGYFGNPSEVGGSCQPCQCHNNIDTTDPEACDKETGRCLKCLYHTEGEHCQFCRFGYYGDALQQDCRKCVCNYLGTVQEHCNGSDCQCDKATGQCLCLPNVIGQNCDRCAPNTWQLASGTGCDPCNCNAAHSFGPSCNEFTGQCQCMPGFGGRTCSECQELFWGDPDVECRACDCDPRGIETPQCDQSTGQCVCVEGVEGPRCDKCTRGYSGVFPDCTPCHQCFALWDVIIAELTNRTHRFLEKAKALKISGVIGPYRETVDSVERKVSEIKDILAQSPAAEPLKNIGNLFEEAEKLIKDVTEMMAQVEVKLSDTTSQSNSTAKELDSLQTEAESLDNTVKELAEQLEFIKNSDIRGALDSITKYFQMSLEAEERVNASTTEPNSTVEQSALMRDRVEDVMMERESQFKEKQEEQARLLDELAGKLQSLDLSAAAEMTCGTPPGASCSETECGGPNCRTDEGERKCGGPGCGGLVTVAHNAWQKAMDLDQDVLSALAEVEQLSKMVSEAKLRADEAKQSAEDILLKTNATKEKMDKSNEELRNLIKQIRNFLTQDSADLDSIEAVANEVLKMEMPSTPQQLQNLTEDIRERVESLSQVEVILQHSAADIARAEMLLEEAKRASKSATDVKVTADMVKEALEEAEKAQVAAEKAIKQADEDIQGTQNLLTSIESETAASEETLFNASQRISELERNVEELKRKAAQNSGEAEYIEKVVYTVKQSAEDVKKTLDGELDEKYKKVENLIAKKTEESADARRKAEMLQNEAKTLLAQANSKLQLLKDLERKYEDNQRYLEDKAQELARLEGEVRSLLKDISQKVAVYSTCL

SEQ ID NO: 484 - protein, 1575 aa, Homo sapiens
MAAAALLLGLALLAPRAAGAGMGACYDGAGRPQRCLPVFENAAFGRLAQASHTCGSPPEDFCPHVGAAGAGAHCQRCDAADPQRHHNASYLTDFHSQDESTWWQSPSMAFGVQYPTSVNITLRLGKAYEITYVRLKFHTSRPESFAIYKRSRADGPWEPYQFYSASCQKTYGRPEGQYLRPGEDERVAFCTSEFSDISPLSGGNVAFSTLEGRPSAYNFEESPGLQEWVTSTELLISLDRLNTFGDDIFKDPKVLQSYYYAVSDFSVGGRCKCNGHASECGPDVAGQLACRCQHNTTGTDCERCLPFFQDRPWARGTAEAAHECLPCNCSGRSEECTFDRELFRSTGHGGRCHHCRDHTAGPHCERCQENFYHWDPRMPCQPCDCQSAGSLHLQCDDTGTCACKPTVTGWKCDRCLPGFHSLSEGGCRPCTCNPAGSLDTCDPRSGRCPCKENVEGNLCDRCRPGTFNLQPHNPAGCSSCFCYGHSKVCASTAQFQVHHILSDFHQGAEGWWARSVGGSEHPPQWSPNGVLLSPEDEEELTAPEKFLGDQRFSYGQPLILTFRVPPGDSPLPVQLRLEGTGLALSLRHSSLSGPQDAGHPREVELRFHLQETSEDVAPPLPPFHFQRLLANLTSLRLRVSPGPSPAGPVFLTEVRLTSARPGLSPPASWVEICSCPTGYTGQFCESCAPGYKREMPQGGPYASCVPCTCNQHGTCDPNTGICVCSHHTEGPSCERCLPGFYGNPFAGQADDCQPCPCPGQSACTTIPESREVVCTHCPPGQRGRRCEVCDDGFFGDPLGLFGHPQPCHQCQCSGNVDPNAVGNCDPLSGHCLRCLHNTTGDHCEHCQEGFYGSALAPRPADKCMPCSCHPQGSVSEQMPCDPVTGQCSCLPHVTARDCSRCYPGFFDLQPGRGCRSCKCHPLGSQEDQCHPKTGQCTCRPGVTGQACDRCQLGFFGFSIKGCRACRCSPLGAASAQCHENGTCVCRPGFEGYKCDRCHDNFFLTADGTHCQQCPSCYALVKEEAAKLKARLTLTEGWLQGSDCGSPWGPLDILLGEAPRGDVYQGHHLLPGAREAFLEQMMSLEGAVKAAREQLQRLNKGARCAQAGSQKTCTQLADLEAVLESSEEEILHAAAILASLEIPQEGPSQPTKWSHLATEARALARSHRDTATKIAATAWRALLASNTSYALLWNLLEGRVALETQRDLEDRYQEVQAAQKALRTAVAEVLPEAESVLATVQQVGADTAPYLALLASPGALPQKSRAEDLGLKAKALEKTVASWQHMATEAARTLQTAAQATLRQTEPLTKLHQEARAALTQASSSVQAATVTVMGARTLLADLEGMKLQFPRPKDQAALQRKADSVSDRLLADTRKKTKQAERMLGNAAPLSSSAKKKGREAEVLAKDSAKLAKALLRERKQAHRRASRLTSQTQATLQQASQQVLASEARRQELEEAERVGAGLSEMEQQIRESRISLEKDIETLSELLARLGSLDTHQAPAQALNETQWALERLRLQLGSPGSLQRKLSLLEQESQQQELQIQGFESDLAEIRADKQNLEAILHSLPENCASWQ

SEQ ID NO: 485 - protein, 167 aa, Homo sapiens
MHWGTLCGFLWLWPYLFYVQAVPIQKVQDDTKTLIKTIVTRINDISHTQSVSSKQKVTGLDFIPGLHPILTLSKMDQTLAVYQQILTSMPSRNVIQISNDLENLRDLLHVLAFSKSCHLPWASGLETLDSLGGVLEASGYSTEVVALSRLQGSLQDMLWQLDLSPGC

SEQ ID NO: 486 - protein, 207 aa, Homo sapiens
MAALVEPLGLERDVSRAVELLERLQRSGELPPQKLQALQRVLQSRFCSAIREVYEQLYDTLDITGSAEIRAHATAKATVAAFTASEGHAHPRVVELPKTDEGLGFNIMGGKEQNSPIYISRVIPGGVADRHGGLKRGDQLLSVNGVSVEGEQHEKAVELLKAAQGSVKLVVRYTPRVLEEMEARFEKMRSARRRQQHQSYSSLESRG

SEQ ID NO: 487 - protein, 406 aa, Homo sapiens
MDIATGPESLERCFPRGQTDCAKMLDGIKMEEHALRPGPATLGVLLGSDCPHPAVCEGCQRPISDRFLMRVNESSWHEECLQCAACQQALTTSCYFRDRKLYCKQDYQQLFAAKCSGCMEKIAPTEFVMRALECVYHLGCFCCCVCERQLRKGDEFVLKEGQLLCKGDYEKEKDLLSSVSPDESDSVKSEDEDGDMKPAKGQGSQSKGSGDDGKDPRRPKRPRTILTTQQRRAFKASFEVSSKPCRKVRETLAAETGLSVRVVQVWFQNQRAKMKKLARRHQQQQEQQNSQRLGQGEPGPGQGLGQEVLSSRMEGMMASYTPLAPPQQQIVAMEQSPYGSSDPFQQGLTPPQMPGNDSIFHDIDSDTSLTSLSDCFLGSSDVGSLQARVGNPIDRLYSMQSSYFAS

SEQ ID NO: 488 - protein, 475 aa, Homo sapiens
MESKALLVLTLAVWLQSLTASRGGVAAADQRRDFIDIESKFALRTPEDTAEDTCHLIPGVAESVATCHFNHSSKTFMVIHGWTVTGMYESWVPKLVAALYKREPDSNVIVVDWLSRAQEHYPVSAGYTKLVGQDVARFINWMEEEFNYPLDNVHLLGYSLGAHAAGIAGSLTNKKVNRITGLDPAGPNFEYAEAPSRLSPDDADFVDVLHTFTRGSPGRSIGIQKPVGHVDIYPNGGTFQPGCNIGEAIRVIAERGLGDVDQLVKCSHERSIHLFIDSLLNEENPSKAYRCSSKEAFEKGLCLSCRKNRCNNLGYEINKVRAKRSSKMYLKTRSQMPYKVFHYQVKIHFSGTESETHTNQAFEISLYGTVAESENIPFTLPEVSTNKTYSFLIYTEVDIGELLMLKLKWKSDSYFSWSDWWSSPGFAIQKIRVKAGETQKKVIFCSREKVSHLQKGKAPAVFVKCHDKSLNKKSG

SEQ ID NO: 489 - protein, 2863 aa, Homo sapiens
MASEDNRVPSPPPTGDDGGGGGREETPTEGGALSLKPGLPIRGIRMKFAVLTGLVEVGEVSNRDIVETVFNLLVGGQFDLEMNFIIQEGESINCMVDLLEKCDITCQAEVWSMFTAILKKSIRNLQVCTEVGLVEKVLGKIEKVDNMIADLLVDMLGVLASYNLTVRELKLFFSKLQGDKGRWPPHAGKLLSVLKHMPQKYGPDAFFNFPGKSAAAIALPPIAKWPYQNGFTFHTWLRMDPVNNINVDKDKPYLYCFRTSKGLGYSAHFVGGCLIVTSIKSKGKGFQHCVKFDFKPQKWYMVTIVHIYNRWKNSELRCYVNGELASYGEITWFVNTSDTFDKCFLGSSETADANRVFCGQMTAVYLFSEALNAAQIFAIYQLGLGYKGTFKFKAESDLFLAEHHKLLLYDGKLSSAIAFTYNPRATDAQLCLESSPKDNPSIFVHSPHALMLQDVKAVLTHSIQSAMHSIGGVQVLFPLFAQLDYRQYLSDEIDLTICSTLLAFIMELLKNSIAMQEQMLACKGFLVIGYSLEKSSKSHVSRAVLELCLAFSKYLSNLQNGMPLLKQLCDHVLLNPAIWIHTPAKVQLMLYTYLSTEFIGTVNIYNTIRRVGTVLLIMHTLKYYYWAVNPQDRSGITPKGLDGPRPNQKEMLSLRAFLLMFIKQLVMKDSGVKEDELQAILNYLLTMHEDDNLMDVLQLLVALMSEHPNSMIPAFDQRNGLRVIYKLLASKSEGIRVQALKAMGYFLKHLAPKRKAEVMLGHGLFSLLAERLMLQTNLITMTTYNVLFEILIEQIGTQVIHKQHPDPDSSVKIQNPQILKVIATLLRNSPQCPESMEVRRAFLSDMIKLFNNSRENRRSLLQCSVWQEWMLSLCYFNPKNSDEQKITEMVYAIFRILLYHAVKYEWGGWRVWVDTLSITHSKVTFEIHKENLANIFREQQGKVDEEIGLCSSTSVQAASGIRRDINVSVGSQQPDTKDSPVCPHFTTNGNENSSIEKTSSLESASNIELQTTNTSYEEMKAEQENQELPDEGTLEETLTNETRNADDLEVSSDIIEAVAISSNSFITTGKDSMTVSEVTASISSPSEEDASEMPEFLDKSIVEEEEDDDYVELKVEGSPTEEANLPTELQDNSLSPAASEAGEKLDMFGNDDKLIFQEGKPVTEKQTDTETQDSKDSGIQTMTASGSSAMSPETTVSQIAVESDLGQMLEEGKKATNLTRETKLINDCHGSVSEASSEQKIAKLDVSNVATDTERLELKASPNVEAPQPHRHVLEISRQHEQPGQGIAPDAVNGQRRDSRSTVFRIPEFNWSQMHQRLLTDLLFSIETDIQMWRSHSTKTVMDFVNSSDNVIFVHNTIHLISQVMDNMVMACGGILPLLSAATSATHELENIEPTQGLSIEASVTFLQRLISLVDVLIFASSLGFTEIEAEKSMSSGGILRQCLRLVCAVAVRNCLECQQHSQLKTRGDKALKPMHSLIPLGKSAAKSPVDIVTGGISPVRDLDRLLQDMDINRLRAVVFRDIEDSKQAQFLALAVVYFISVLMVSKYRDILEPQNERHSQSCTETGSENENVSLSEITPAAFSTLTTASVEESESTSSARRRDSGIGEETATGLGSHVEVTPHTAPPGVSAGPDAISEVLSTLSLEVNKSPETKNDRGNDLDTKATPSVSVSKNVNVKDILRSLVNIPADGVTVDPALLPPACLGALGDLSVEQPVQFRSFDRSVIVAAKKSAVSPSTFNTSIPTNAVSVVSSVDSAQASDMGGESPGSRSSNAKLPSVPTVDSVSQDPVSNMSITERLEHALEKAAPLLREIFVDFAPFLSRTLLGSHGQELLIEGTSLVCMKSSSSVVELVMLLCSQEWQNSIQKNAGLAFIELVNEGRLLSQTMKDHLVRVANEAEFILSRQRAEDIHRHAEFESLCAQYSADKREDEKMCDHLIRAAKYRDHVTATQLIQKIINILTDKHGAWGNSAVSRPLEFWRLDYWEDDLRRRRRFVRNPLGSTHPEATLKTAVEHVCIFKLRENSKATDEDILAKGKQSIRSQALGNQNSENEILLEGDDDTLSSVDEKDLENLAGPVSLSTPAQLVAPSVVVKGTLSVTSSELYFEVDEEDPNFKKIDPKILAYTEGLHGKWLFTEIRSIFSRRYLLQNTALEIFMANRVAVMFNFPDPATVKKVVNYLPRVGVGTSFGLPQTRRISLASPRQLFKASNMTQRWQHREISNFEYLMFLNTIAGRSYNDLNQYPVFPWVITNYESEELDLTLPTNFRDLSKPIGALNPKRAAFFAERYESWEDDQVPKFHYGTHYSTASFVLAWLLRIEPFTTYFLNLQGGKFDHADRTFSSISRAWRNSQRDTSDIKELIPEFYYLPEMFVNFNNYNLGVMDDGTVVSDVELPPWAKTSEEFVHINRLALESEFVSCQLHQWIDLIFGYKQQGPEAVRALNVFYYLTYEGAVNLNSITDPVLREAVEAQIRSFGQTPSQLLIEPHPPRGSAMQVSPLMFTDKAQQDVIMVLKFPSNSPVTHVAANTQPGLATPAVITVTANRLFAVNKWHNLPAHQGAVQDQPYQLPVEIDPLIASNTGMHRRQITDLLDQSIQVHSQCFVITSDNRYILVCGFWDKSFRVYSTDTGRLIQVVFGHWDVVTCLARSESYIGGNCYILSGSRDATLLLWYWNGKCSGIGDNPGSETAAPRAILTGHDYEVTCAAVCAELGLVLSGSQEGPCLIHSMNGDLLRTLEGPENCLKPKLIQASREGHCVIFYENGLFCTFSVNGKLQATMETDDNIRAIQLSRDGQYLLTGGDRGVVVVRQVSDLKQLFAYPGCDAGIRAMALSYDQRCIISGMASGSIVLFYNDFNRWHHEYQTRY

SEQ ID NO: 490 - protein, 719 aa, Homo sapiens
MEKILFYLFLIGIAVKAQICPKRCVCQILSPNLATLCAKKGLLFVPPNIDRRTVELRLADNFVTNIKRKDFANMTSLVDLTLSRNTISFITPHAFADLRNLRALHLNSNRLTKITNDMFSGLSNLHHLILNNNQLTLISSTAFDDVFALEELDLSYNNLETIPWDAVEKMVSLHTLSLDHNMIDNIPKGTFSHLHKMTRLDVTSNKLQKLPPDPLFQRAQVLATSGIISPSTFALSFGGNPLHCNCELLWLRRLSREDDLETCASPPLLTGRYFWSIPEEEFLCEPPLITRHTHEMRVLEGQRATLRCKARGDPEPAIHWISPEGKLISNATRSLVYDNGTLDILITTVKDTGAFTCIASNPAGEATQIVDLHIIKLPHLLNSTNHIHEPDPGSSDISTSTKSGSNTSSSNGDTKLSQDKIVVAEATSSTALLKFNFQRNIPGIRMFQIQYNGTYDDTLVYRMIPPTSKTFLVNNLAAGTMYDLCVLAIYDDGITSLTATRVVGCIQFTTEQDYVRCHFMQSQFLGGTMIIIIGGIIVASVLVFIIILMIRYKVCNNNGQHKVTKVSNVYSQTNGAQIQGCSVTLPQSVSKQAVGHEENAQCCKATSDNVIQSSETCSSQDSSTTTSALPPSWTSSTSVSQKQKRKTGTKPSTEPQNEAVTNVESQNTNRNNSTALQLASRPPDSVTEGPTSKRAHIKPNALLTNVDQIVQETQRLELI

SEQ ID NO: 491 - protein, 4655 aa, Homo sapiens
MDRGPAAVACTLLLALVACLAPASGQECDSAHFRCGSGHCIPADWRCDGTKDCSDDADEIGCAVVTCQQGYFKCQSEGQCIPNSWVCDQDQDCDDGSDERQDCSQSTCSSHQITCSNGQCIPSEYRCDHVRDCPDGADENDCQYPTCEQLTCDNGACYNTSQKCDWKVDCRDSSDEINCTEICLHNEFSCGNGECIPRAYVCDHDNDCQDGSDEHACNYPTCGGYQFTCPSGRCIYQNWVCDGEDDCKDNGDEDGCESGPHDVHKCSPREWSCPESGRCISIYKVCDGILDCPGREDENNTSTGKYCSMTLCSALNCQYQCHETPYGGACFCPPGYIINHNDSRTCVEFDDCQIWGICDQKCESRPGRHLCHCEEGYILERGQYCKANDSFGEASIIFSNGRDLLIGDIHGRSFRILVESQNRGVAVGVAFHYHLQRVFWTDTVQNKVFSVDINGLNIQEVLNVSVETPENLAVDWVNNKIYLVETKVNRIDMVNLDGSYRVTLITENLGHPRGIAVDPTVGYLFFSDWESLSGEPKLERAFMDGSNRKDLVKTKLGWPAGVTLDMISKRVYWVDSRFDYIETVTYDGIQRKTVVHGGSLIPHPFGVSLFEGQVFFTDWTKMAVLKANKFTETNPQVYYQASLRPYGVTVYHSLRQPYATNPCKDNNGGCEQVCVLSHRTDNDGLGFRCKCTFGFQLDTDERHCIAVQNFLIFSSQVAIRGIPFTLSTQEDVMVPVSGNPSFFVGIDFDAQDSTIFFSDMSKHMIFKQKIDGTGREILAANRVENVESLAFDWISKNLYWTDSHYKSISVMRLADKTRRTVVQYLNNPRSVVVHPFAGYLFFTDWFRPAKIMRAWSDGSHLLPVINTTLGWPNGLAIDWAASRLYWVDAYFDKIEHSTFDGLDRRRLGHIEQMTHPFGLAIFGEHLFFTDWRLGAIIRVRKADGGEMTVIRSGIAYILHLKSYDVNIQTGSNACNQPTHPNGDCSHFCFPVPNFQRVCGCPYGMRLASNHLTCEGDPTNEPPTEQCGLFSFPCKNGRCVPNYYLCDGVDDCHDNSDEQLCGTLNNTCSSSAFTCGHGECIPAHWRCDKRNDCVDGSDEHNCPTHAPASCLDTQYTCDNHQCISKNWVCDTDNDCGDGSDEKNCNSTETCQPSQFNCPNHRCIDLSFVCDGDKDCVDGSDEVGCVLNCTASQFKCASGDKCIGVTNRCDGVFDCSDNSDEAGCPTRPPGMCHSDEFQCQEDGICIPNFWECDGHPDCLYGSDEHNACVPKTCPSSYFHCDNGNCIHRAWLCDRDNDCGDMSDEKDCPTQPFRCPSWQWQCLGHNICVNLSVVCDGIFDCPNGTDESPLCNGNSCSDFNGGCTHECVQEPFGAKCLCPLGFLLANDSKTCEDIDECDILGSCSQHCYNMRGSFRCSCDTGYMLESDGRTCKVTASESLLLLVASQNKIIADSVTSQVHNIYSLVENGSYIVAVDFDSISGRIFWSDATQGKTWSAFQNGTDRRVVFDSSIILTETIAIDWVGRNLYWTDYALETIEVSKIDGSHRTVLISKNLTNPRGLALDPRMNEHLLFWSDWGHHPRIERASMDGSMRTVIVQDKIFWPCGLTIDYPNRLLYFMDSYLDYMDFCDYNGHHRRQVIASDLIIRHPYALTLFEDSVYWTDRATRRVMRANKWHGGNQSVVMYNIQWPLGIVAVHPSKQPNSVNPCAFSRCSHLCLLSSQGPHFYSCVCPSGWSLSPDLLNCLRDDQPFLITVRQHIIFGISLNPEVKSNDAMVPIAGIQNGLDVEFDDAEQYIYWVENPGEIHRVKTDGTNRTVFASISMVGPSMNLALDWISRNLYSTNPRTQSIEVLTLHGDIRYRKTLIANDGTALGVGFPIGITVDPARGKLYWSDQGTDSGVPAKIASANMDGTSVKTLFTGNLEHLECVTLDIEEQKLYWAVTGRGVIERGNVDGTDRMILVHQLSHPWGIAVHDSFLYYTDEQYEVIERVDKATGANKIVLRDNVPNLRGLQVYHRRNAAESSNGCSNNMNACQQICLPVPGGLFSCACATGFKLNPDNRSCSPYNSFIVVSMLSAIRGFSLELSDHSETMVPVAGQGRNALHVDVDVSSGFIYWCDFSSSVASDNAIRRIKPDGSSLMNIVTHGIGENGVRGIAVDWVAGNLYFTNAFVSETLIEVLRINTTYRRVLLKVTVDMPRHIVVDPKNRYLFWADYGQRPKIERSFLDCTNRTVLVSEGIVTPRGLAVDRSDGYVYWVDDSLDIIARIRINGENSEVIRYGSRYPTPYGITVFENSIIWVDRNLKKIFQASKEPENTEPPTVIRDNINWLRDVTIFDKQVQPRSPAEVNNNPCLENNGGCSHLCFALPGLHTPKCDCAFGTLQSDGKNCAISTENFLIFALSNSLRSLHLDPENHSPPFQTINVERTVMSLDYDSVSDRIYFTQNLASGVGQISYATLSSGIHTPTVIASGIGTADGIAFDWITRRIYYSDYLNQMINSMAEDGSNRTVIARVPKPRAIVLDPCQGYLYWADWDTHAKIERATLGGNFRVPIVNSSLVMPSGLTLDYEEDLLYWVDASLQRIERSTLTGVDREVIVNAAVHAFGLTLYGQYIYWTDLYTQRIYRANKYDGSGQIAMTTNLLSQPRGINTVVKNQKQQCNNPCEQFNGGCSHICAPGPNGAECQCPHEGNWYLANNRKHCIVDNGERCGASSFTCSNGRCISEEWKCDNDNDCGDGSDEMESVCALHTCSPTAFTCANGRCVQYSYRCDYYNDCGDGSDEAGCLFRDCNATTEFMCNNRRCIPREFICNGVDNCHDNNTSDEKNCPDRTCQSGYTKCHNSNICIPRVYLCDGDNDCGDNSDENPTYCTTHTCSSSEFQCASGRCIPQHWYCDQETDCFDASDEPASCGHSERTCLADEFKCDGGRCIPSEWICDGDNDCGDMSDEDKRHQCQNQNCSDSEFLCVNDRPPDRRCIPQSWVCDGDVDCTDGYDENQNCTRRTCSENEFTCGYGLCIPKIFRCDRHNDCGDYSDERGCLYQTCQQNQFTCQNGRCISKTFVCDEDNDCGDGSDELMHLCHTPEPTCPPHEFKCDNGRCIEMMKLCNHLDDCLDNSDEKGCGINECHDPSISGCDHNCTDTLTSFYCSCRPGYKLMSDKRTCVDIDECTEMPFVCSQKCENVIGSYICKCAPGYLREPDGKTCRQNSNIEPYLIFSNRYYLRNLTIDGYFYSLILEGLDNVVALDFDRVEKRLYWIDTQRQVIERMFLNKTNKETIINHRLPAAESLAVDWVSRKLYWLDARLDGLFVSDLNGGHRRMLAQHCVDANNTFCFDNPRGLALHPQYGYLYWADWGHRAYIGRVGMDGTNKSVIISTKLEWPNGITIDYTNDLLYWADAHLGYIEYSDLEGHHRHTVYDGALPHPFAITIFEDTIYWTDWNTRTVEKGNKYDGSNRQTLVNTTHRPFDIHVYHPYRQPIVSNPCGTNNGGCSHLCLIKPGGKGFTCECPDDFRTLQLSGSTYCMPMCSSTQFLCANNEKCIPIWWKCDGQKDCSDGSDELALCPQRFCRLGQFQCSDGNCTSPQTLCNAHQNCPDGSDEDRLLCENHHCDSNEWQCANKRCIPESWQCDTFNDCEDNSDEDSSHCASRTCRPGQFRCANGRCIPQAWKCDVDNDCGDHSDEPIEECMSSAHLCDNFTEFSCKTNYRCIPKWAVCNGVDDCRDNSDEQGCEERTCHPVGDFRCKNHHCIPLRWQCDGQNDCGDNSDEENCAPRECTESEFRCVNQQCIPSRWICDHYNDCGDNSDERDCEMRTCHPEYFQCTSGHCVHSELKCDGSADCLDASDEADCPTRFPDGAYCQATMFECKNHVCIPPYWKCDGDDDCGDGSDEELHLCLDVPCNSPNRFRCDNNRCIYSHEVCNGVDDCGDGTDETEEHCRKPTPKPCTEYEYKCGNGHCIPHDNVCDDADDCGDWSDELGCNKGKERTCAENICEQNCTQLNEGGFICSCTAGFETNVFDRTSCLDINECEQFGTCPQHCRNTKGSYECVCADGFTSMSDRPGKRCAAEGSSPLLLLPDNVRIRKYNLSSERFSEYLQDEEYIQAVDYDWDPKDIGLSVVYYTVRGEGSRFGAIKRAYIPNFESGRNNLVQEVDLKLKYVMQPDGIAVDWVGRHIYWSDVKNKRIEVAKLDGRYRKWLISTDLDQPAAIAVNPKLGLMFWTDWGKEPKIESAWMNGEDRNILVFEDLGWPTGLSIDYLNNDRIYWSDFKEDVIETIKYDGTDRRVIAKEAMNPYSLDIFEDQLYWISKEKGEVWKQNKFGQGKKEKTLVVNPWLTQVRIFHQLRYNKSVPNLCKQICSHLCLLRPGGYSCACPQGSSFIEGSTTECDAAIELPINLPPPCRCMHGGNCYFDETDLPKCKCPSGYTGKYCEMAFSKGISPGTTAVAVLLTILLIVVIGALAIAGFFHYRRTGSLLPALPKLPSLSSLVKPSENGNGVTFRSGADLNMDIGVSGFGPETAIDRSMAMSEDFVMEMGKQPIIFENPMYSARDSAVKVVQPIQVTVSENVDNKNYGSPINPSEIVPETNPTSPAADGTQVTKWNLFKRKSKQTTNFENPIYAQMENEQKESVAATPPPSPSLPAKPKPPSRRDPTPTYSATEDTFKDTANLVKEDSEV

SEQ ID NO: 492 - protein, 347 aa, Homo sapiens
MKLTSEKLPKNPFYASVSQYAAKNQKFFQWKKEKTDYTHANLVDKALQLLKERILKGDTLAYFLRGQLYFEEGWYEEALEQFEEIKEKDHQATYQLGVMYYDGLGTTLDAEKGVDYMKKILDSPCPKARHLKFAAAYNLGRAYYEGKGVKRSNEEAERLWLIAADNGNPKASVKAQSMLGLYYSTKEPKELEKAFYWHSEACGNGNLESQGALGLMYLYGQGIRQDTEAALQCLREAAERGNVYAQGNLVEYYYKMKFFTKCVAFSKRIADYDEVHDIPMIAQVTDCLPEFIGRGMAMASFYHARCLQLGLGITRDETTAKHYYSKACRLNPALADELHSLLIRQRI

SEQ ID NO: 493 - protein, 1394 aa, Homo sapiens
MAALLRSARWLLRAGAAPRLPLSLRLLPGGPGRLHAASYLPAARAGPVAGGLLSPARLYAIAAKEKDIQEESTFSSRKISNQFDWALMRLDLSVRRTGRIPKKLLQKVFNDTCRSGGLGGSHALLLLRSCGSLLPELKLEERTEFAHRIWDTLQKLGAVYDVSHYNALLKVYLQNEYKFSPTDFLAKMEEANIQPNRVTYQRLIASYCNVGDIEGASKILGFMKTKDLPVTEAVFSALVTGHARAGDMENAENILTVMRDAGIEPGPDTYLALLNAYAEKGDIDHVKQTLEKVEKSELHLMDRDLLQIIFSFSKAGYPQYVSEILEKVTCERRYIPDAMNLILLLVTEKLEDVALQILLACPVSKEDGPSVFGSFFLQHCVTMNTPVEKLTDYCKKLKEVQMHSFPLQFTLHCALLANKTDLAKALMKAVKEEGFPIRPHYFWPLLVGRRKEKNVQGIIEILKGMQELGVHPDQETYTDYVIPCFDSVNSARAILQENGCLSDSDMFSQAGLRSEAANGNLDFVLSFLKSNTLPISLQSIRSSLLLGFRRSMNINLWSEITELLYKDGRYCQEPRGPTEAVGYFLYNLIDSMSDSEVQAKEEHLRQYFHQLEKMNVKIPENIYRGIRNLLESYHVPELIKDAHLLVESKNLDFQKTVQLTSSELESTLETLKAENQPIRDVLKQLILVLCSEENMQKALELKAKYESDMVTGGYAALINLCCRHDKVEDALNLKEEFDRLDSSAVLDTGKYVGLVRVLAKHGKLQDAINILKEMKEKDVLIKDTTALSFFHMLNGAALRGEIETVKQLHEAIVTLGLAEPSTNISFPLVTVHLEKGDLSTALEVAIDCYEKYKVLPRIHDVLCKLVEKGETDLIQKAMDFVSQEQGEMVMLYDLFFAFLQTGNYKEAKKIIETPGIRARSARLQWFCDRCVANNQVETLEKLVELTQKLFECDRDQMYYNLLKLYKINGDWQRADAVWNKIQEENVIPREKTLRLLAEILREGNQEVPFDVPELWYEDEKHSLNSSSASTTEPDFQKDILIACRLNQKKGAYDIFLNAKEQNIVFNAETYSNLIKLLMSEDYFTQAMEVKAFAETHIKGFTLNDAANSRLIITQVRRDYLKEAVTTLKTVLDQQQTPSRLAVTRVIQALAMKGDVENIEVVQKMLNGLEDSIGLSKMVFINNIALAQIKNNNIDAAIENIENMLTSENKVIEPQYFGLAYLFRKVIEEQLEPAVEKISIMAERLANQFAIYKPVTDFFLQLVDAGKVDDARALLQRCGAIAEQTPILLLFLLRNSRKQGKASTVKSVLELIPELNEKEEAYNSLMKSYVSEKDVTSAKALYEHLTAKNTKLDDLFLKRYASLLKYAGEPVPFIEPPESFEFYAQQLRKLRENSS

SEQ ID NO: 494 - protein, 524 aa, Homo sapiens
MFHCIPLWRCNRHVESIDKRHCSLVYVPEEIYRYARSLEELLLDANQLRELPEQFFQLVKLRKLGLSDNEIQRLPPEIANFMQLVELDVSRNEIPEIPESISFCKALQVADFSGNPLTRLPESFPELQNLTCLSVNDISLQSLPENIGNLYNLASLELRENLLTYLPDSLTQLRRLEELDLGNNEIYNLPESIGALLHLKDLWLDGNQLSELPQEIGNLKNLLCLDVSENRLERLPEEISGLTSLTDLVISQNLLETIPDGIGKLKKLSILKVDQNRLTQLPEAVGECESLTELVLTENQLLTLPKSIGKLKKLSNLNADRNKLVSLPKEIGGCCSLTVFCVRDNRLTRIPAEVSQATELHVLDVAGNRLLHLPLSLTALKLKALWLSDNQSQPLLTFQTDTDYTTGEKILTCVLLPQLPSEPTCQENLPRCGALENLVNDVSDEAWNERAVNRVSAIRFVEDEKDEEDNETRTLLRRATPHPGELKHMKKTVENLRNDMNAAKGLDSNKNEVNHAIDRVTTSV

SEQ ID NO: 495 - protein, 1537 aa, Homo sapiens
MTTKRKIIGRLVPCRCFRGEEEIISVLDYSHCSLQQVPKEVFNFERTLEELYLDANQIEELPKQLFNCQALRKLSIPDNDLSNLPTTIASLVNLKELDISKNGVQEFPENIKCCKCLTIIEASVNPISKLPDGFTQLLNLTQLYLNDAFLEFLPANFGRLVKLRILELRENHLKTLPKSMHKLAQLERLDLGNNEFGELPEVLDQIQNLRELWMDNNALQVLPGSIGKLKMLVYLDMSKNRIETVDMDISGCEALEDLLLSSNMLQQLPDSIGLLKKLTTLKVDDNQLTMLPNTIGNLSLLEEFDCSCNELESLPSTIGYLHSLRTLAVDENFLPELPREIGSCKNVTVMSLRSNKLEFLPEEIGQMQKLRVLNLSDNRLKNLPFSFTKLKELAALWLSDNQSKALIPLQTEAHPETKQRVLTNYMFPQQPRGDEDFQSDSDSFNPTLWEEQRQQRMTVAFEFEDKKEDDENAGKVKDLSCQAPWERGQRGITLQPARLSGDCCTPWARCDQQIQDMPVPQNDPQLAWGCISGLQQERSMCTPLPVAAQSTTLPSLSGRQVEINLKRYPTPYPEDLKNMVKSVQNLVGKPSHGVRVENSNPTANTEQTVKEKYEHKWPVAPKEITVEDSFVHPANEMRIGELHPSLAETPLYPPKLVLLGKDKKESTDESEVDKTHCLNNSVSSGTYSDYSPSQASSGSSNTRVKVGSLQTTAKDAVHNSLWGNRIAPSFPQPLDSKPLLSQREAVPPGNIPQRPDRLPMSDTFTDNWTDGSHYDNTGFVAEETTAENANSNPLLSSKSRSTSSHGRRPLIRQDRIVGVPLELEQSTHRHTPETEVPPSNPWQNWTRTPSPFEDRTAFPSKLETTPTTSPLPERKEHIKESTEIPSPFSPGVPWEYHDSNPNRSLSNVFSQIHCRPESSKGVISISKSTERLSPLMKDIKSNKFKKSQSIDEIDIGTYKVYNIPLENYASGSDHLGSHERPDKMLGPEHGMSSMSRSQSVPMLDDEMLTYGSSKGPQQQKASMTKKVYQFDQSFNPQGSVEVKAEKRIPPPFQHNPEYVQQASKNIAKDLISPRAYRGYPPMEQMFSFSQPSVNEDAVVNAQFASQGARAGFLRRADSLVSATEMAMFRRVNEPHELPPTDRYGRPPYRGGLDRQSSVTVTESQFLKRNGRYEDEHPSYQEVKAQAGSFPVKNLTQRRPLSARSYSTESYGASQTRPVSARPTMAALLEKIPSDYNLGNYGDKPSDNSDLKTRPTPVKGEESCGKMPADWRQQLLRHIEARRLDRNAAYKHNTVNLGMLPYGGISAMHAGRSMTLNLQTKSKFDHQELPLQKTPSQQSNILDNGQEDVSPSGQWNPYPLGRRDVPPDTITKKAGSHIQTLMGSQSLQHRSREQQPYEGNINKVTIQQFQSPLPIQIPSSQATRGPQPGRCLIQTKGQRSMDGYPEQFCVRIEKNPGLGFSISGGISGQGNPFKPSDKGIFVTRVQPDGPASNLLQPGDKILQANGHSFVHMEHEKAVLLLKSFQNTVDLVIQRELTV

SEQ ID NO: 496 - protein, 840 aa, Homo sapiens
MAGPGSTGGQIGAAALAGGARSKVAPSVDFDHSCSDSVEYLTLNFGPFETVHRWRRLPPCDEFVGARRSKHTVVAYKDAIYVFGGDNGKTMLNDLLRFDVKDCSWCRAFTTGTPPAPRYHHSAVVYGSSMFVFGGYTGDIYSNSNLKNKNDLFEYKFATGQWTEWKIEGRLPVARSAHGATVYSDKLWIFAGYDGNARLNDMWTIGLQDRELTCWEEVAQSGEIPPSCCNFPVAVCRDKMFVFSGQSGAKITNNLFQFEFKDKTWTRIPTEHLLRGSPPPPQRRYGHTMVAFDRHLYVFGGAADNTLPNELHCYDVDFQTWEVVQPSSDSEVGGAEVPERACASEEVPTLTYEERVGFKKSRDVFGLDFGTTSAKQPTQPASELPSGRLFHAAAVISDAMYIFGGTVDNNIRSGEMYRFQFSCYPKCTLHEDYGRLWESRQFCDVEFVLGEKEECVQGHVAIVTARSRWLRRKITQARERLAQKLEQEAAPVPREAPGVAAGGARPPLLHVAIREAEARPFEVLMQFLYTDKIKYPRKGHVEDVLLIMDVYKLALSFQLCRLEQLCRQYIEASVDLQNVLVVCESAARLQLSQLKEHCLNFVVKESHFNQVIMMKEFERLSSPLIVEIVRRKQQPPPRTPLDQPVDIGTSLIQDMKAYLEGAGAEFCDITLLLDGHPRPAHKAILAARSSYFEAMFRSFMPEDGQVNISIGEMVPSRQAFESMLRYIYYGEVNMPPEDSLYLFAAPYYYGFYNNRLQAYCKQNLEMNVTVQNVLQILEAADKTQALDMKRHCLHIIVHQFTKVSKLPTLRSLSQQLLLDIIDSLASHISDKQCAELGADI

SEQ ID NO: 497 - protein, 669 aa, Homo sapiens
MAIVQTLPVPLEPAPEAATAPQAPVMGSVSSLISGRPCPGGPAPPRHHGPPGPTFFRQQDGLLRGGYEAQEPLCPAVPPRKAVPVTSFTYINEDFRTESPPSPSSDVEDAREQRAHNAHLRGPPPKLIPVSGKLEKNMEKILIRPTAFKPVLPKPRGAPSLPSFMGPRATGLSGSQGSLTQLFGGPASSSSSSSSSSAADKPLAFSGWASGCPSGTLSDSGRNSLSSLPTYSTGGAEPTTSSPGGHLPSHGSGRGALPGPARGVPTGPSHSDSGRSSSSKSTGSLGGRVAGGLLGSGTRASPDSSSCGERSPPPPPPPPSDEALLHCVLEGKLRDREAELQQLRDSLDENEATMCQAYEERQRHWQREREALREDCAAQAQRAQRAQQLLQLQVFQLQQEKRQLQDDFAQLLQEREQLERRCATLEREQRELGPRLEETKWEVCQKSGEISLLKQQLKESQAELVQKGSELVALRVALREARATLRVSEGRARGLQEAARARELELEACSQELQRHRQEAEQLREKAGQLDAEAAGLREPPVPPATADPFLLAESDEAKVQRAAAGVGGSLRAQVERLRVELQRERRRGEEQRDSFEGERLAWQAEKEQVIRYQKQLQHNYIQMYRRNRQLEQELQQLSLELEARELADLGLAEQAPCICLEEITATEI

SEQ ID NO: 498 - protein, 425 aa, Homo sapiens
MYPSNKKKKVWREEKERLLKMTLEERRKEYLRDYIPLNSILSWKEEMKGKGQNDEENTQETSQVKKSLTEKVSLYRGDITLLEVDAIVNAANASLLGGGGVDGCIHRAAGPCLLAECRNLNGCDTGHAKITCGYDLPAKYVIHTVGPIARGHINGSHKEDLANCYKSSLKLVKENNIRSVAFPCISTGIYGFPNEPAAVIALNTIKEWLAKNHHEVDRIIFCVFLEVDFKIYKKKMNEFFSVDDNNEEEEDVEMKEDSDENGPEEKQSVEEMEEQSQDADGVNTVTVPGPASEEAVEDCKDEDFAKDENITKGGEVTDHSVRDQDHPDGQENDSTKNEIKIETESQSSYMETEELSSNQEDAVIVEQPEVIPLTEDQEEKEGEKAPGEDTPRMPGKSEGSSDLENTPGPDAGAQDEAKEQRNGTK

SEQ ID NO: 499 - protein, 834 aa, Homo sapiens
MAQKMDCGAGLLGFQNPDACRAVCHPLPQPPASTLPLSAFPTLCDPPYSQLRDPPAVLSCYCTPLGASPAPAEASVEDSALLMQTLMEAIQISEAPPTNQATAAASPQSSQPPTANEMADIQVSAAAARPKSAFKVQNATTKGPNGVYDFSQAHNAKDVPNTQPKAAFKSQNATPKGPNAAYDFSQAATTGELAANKSEMAFKAQNATTKVGPNATYNFSQSLNANDLANSRPKTPFKAWNDTTKAPTADTQTQNVNQAKMATSQADIETDPGISEPDGATAQTSADGSQAQNLESRTIIRGKRTRKINNLNVEENSSGDQRRAPLAAGTWRSAPVPVTTQNPPGAPPNVLWQTPLAWQNPSGWQNQTARQTPPARQSPPARQTPPAWQNPVAWQNPVIWPNPVIWQNPVIWPNPIVWPGPVVWPNPLAWQNPPGWQTPPGWQTPPGWQGPPDWQGPPDWPLPPDWPLPPDWPLPTDWPLPPDWIPADWPIPPDWQNLRPSPNLRPSPNSRASQNPGAAQPRDVALLQERANKLVKYLMLKDYTKVPIKRSEMLRDIIREYTDVYPEIIERACFVLEKKFGIQLKEIDKEEHLYILISTPESLAGILGTTKDTPKLGLLLVILGVIFMNGNRASEAVLWEALRKMGLRPGVRHPLLGDLRKLLTYEFVKQKYLDYRRVPNSNPPEYEFLWGLRSYHETSKMKVLRFIAEVQKRDPRDWTAQFMEAADEALDALDAAAAEAEARAEARTRMGIGDEAVSGPWSWDDIEFELLTWDEEGDFGDPWSRIPFTFWARYHQNARSRFPQTFAGPIIGPGGTASANFAANFGAIGFFWVE

SEQ ID NO: 500 - protein, 1249 aa, Homo sapiens
MSQLSKNLGDSSPPAEAPKPPVYSRPTVLMRAPPASSRAPPVPWDPPPIDLQASLAAWQAPQPAWEAPQGQLPAPVVPMTQPPALGGPIVPAPPLGGPMGKPPTPGVLMVHPPPPGAPMAQPPTPGVLMVHPSAPGAPMAHPPPPGTPMSHPPPPGTPMAHPPPPGTPMAHPPPPGTPMVHPPPPGTPMAHPPPPGTPMAHPPPPGTPMAHPPPPGTPMAHPPPPGTPMAQPPAPGVLMAQPLTPGVLMVQPAAPGAPMVQPPPAAMMTQPQPSGAPMAKPPGPGVLMIHPPGARAPMTQPPASGAPMAQPAAPPAQPMAPPAQPMASWAPQAQPLILQIQSQVIRAPPQVPQGPQAPPAQLATPPGWQATSPGWQATQQGWQATPLTWQTTQVTWQAPAVTWQVPPPMRQGPPPIRPGPPPIRPGPPPVRQAPPLIRQAPPVIRQAPPVIRQAPPVIRQAPAVIRQAPPVIRQAPPVIRQAPPVIRQAPPLIRQAPPPIRPAPQVLATQPPLWQALPPPPPLRQAPQARLPAPQVQAAPQVPTAPPATQVPAAPPAGPQVPQPVLPAPLSAPLSAPQAVHCPSIIWQAPKGQPPVPHEIPTSMEFQEVQQTQALAWQAQKAPTHIWQPLPAQEAQRQAPPLVQLEQPFQGAPPSQKAVQIQLPPQQAQASGPQAEVPTLPLQPSWQAPPAVLQAQPGPPVAAANFPLGSAKSLMTPSGECRASSIDRRGSSKERRTSSKERRAPSKDRMIFAATFCAPKAVSAARAHLPAAWKNLPATPETFAPSSSVFPATSQFQPASLNAFKGPSAASETPKSLPYALQDPFACVEALPAVPWVPQPNMNASKASQAVPTFLMATAAAPQATATTQEASKTSVEPPRRSGKATRKKKHLEAQEDSRGHTLAFHDWQGPRPWENLNLSDWEVQSPIQVSGDWEHPNTPRGLSGWEGPSTSRILSGWEGPSASWALSAWEGPSTSRALGLSESPGSSLPVVVSEVASVSPGSSATQDNSKVEAQPLSPLDERANALVQFLLVKDQAKVPVQRSEMVKVILREYKDECLDIINRANNKLECAFGYQLKEIDTKNHAYIIINKLGYHTGNLVASYLDRPKFGLLMVVLSLIFMKGNCVREDLIFNFLFKLGLDVRETNGLFGNTKKLITEVFVRQKYLEYRRIPYTEPAEYEFLWGPRAFLETSKMLVLRFLAKLHKKDPQSWPFHYLEALAECEWEDTDEDEPDTGDSAHGPTSRPPPR

SEQ ID NO: 501 - protein, 153 aa, Homo sapiens
MAPAAATGGSTLPSGFSVFTTLPDLLFIFEFIFGGLVWILVASSLVPWPLVQGWVMFVSVFCFVATTTLIILYIIGAHGGETSWVTLDAAYHCTAALFYLSASVLEALATITMQDGFTYRHYHENIAAVVFSYIATLLYVVHAVFSLIRWKSS

SEQ ID NO: 502 - protein, 527 aa, Homo sapiens
MENQEKASIAGHMFDVVVIGGGISGLSAAKLLTEYGVSVLVLEARDRVGGRTYTIRNEHVDYVDVGGAYVGPTQNRILRLSKELGIETYKVNVSERLVQYVKGKTYPFRGAFPPVWNPIAYLDYNNLWRTIDNMGKEIPTDAPWEAQHADKWDKMTMKELIDKICWTKTARRFAYLFVNINVTSEPHEVSALWFLWYVKQCGGTTRIFSVTNGGQERKFVGGSGQVSERIMDLLGDQVKLNHPVTHVDQSSDNIIIETLNHEHYECKYVINAIPPTLTAKIHFRPELPAERNQLIQRLPMGAVIKCMMYYKEAFWKKKDYCGCMIIEDEDAPISITLDDTKPDGSLPAIMGFILARKADRLAKLHKEIRKKKICELYAKVLGSQEALHPVHYEEKNWCEEQYSGGCYTAYFPPGIMTQYGRVIRQPVGRIFFAGTETATKWSGYMEGAVEAGERAAREVLNGLGKVTEKDIWVQEPESKDVPAVEITHTFWERNLPSVSGLLKIIGFSTSVTALGFVLYKYKLLPRS

SEQ ID NO: 503 - protein, 520 aa, Homo sapiens
MSNKCDVVVVGGGISGMAAAKLLHDSGLNVVVLEARDRVGGRTYTLRNQKVKYVDLGGSYVGPTQNRILRLAKELGLETYKVNEVERLIHHVKGKSYPFRGPFPPVWNPITYLDHNNFWRTMDDMGREIPSDAPWKAPLAEEWDNMTMKELLDKLCWTESAKQLATLFVNLCVTAETHEVSALWFLWYVKQCGGTTRIISTTNGGQERKFVGGSGQVSERIMDLLGDRVKLERPVIYIDQTRENVLVETLNHEMYEAKYVISAIPPTLGMKIHFNPPLPMMRNQMITRVPLGSVIKCIVYYKEPFWRKKDYCGTMIIDGEEAPVAYTLDDTKPEGNYAAIMGFILAHKARKLARLTKEERLKKLCELYAKVLGSLEALEPVHYEEKNWCEEQYSGGCYTTYFPPGILTQYGRVLRQPVDRIYFAGTETATHWSGYMEGAVEAGERAAREILHAMGKIPEDEIWQSEPESVDVPAQPITTTFLERHLPSVPGLLRLIGLTTIFSATALGFLAHKRGLLVRV

SEQ ID NO: 504 - protein, 1827 aa, Homo sapiens
MADERKDEAKAPHWTSAPLTEASAHSHPPEIKDQGGAGEGLVRSANGFPYREDEEGAFGEHGSQGTYSNTKENGINGELTSADRETAEEVSARIVQVVTAEAVAVLKGEQEKEAQHKDQTAALPLAAEETANLPPSPPPSPASEQTVTVEEDLLTASKMEFHDQQELTPSTAEPSDQKEKESEKQSKPGEDLKHAALVSQPETTKTYPDKKDMQGTEEEKAPLALFGHTLVASLEDMKQKTEPSLVVPGIDLPKEPPTPKEQKDWFIEMPTEAKKDEWGLVAPISPGPLTPMREKDVFDDIPKWEGKQFDSPMPSPFQGGSFTLPLDVMKNEIVTETSPFAPAFLQPDDKKSLQQTSGPATAKDSFKIEEPHEAKPDKMAEAPPSEAMTLPKDAHIPVVEEHVMGKVLEEEKEAINQETVQQRDTFTPSGQEPILTEKETELKLEEKTTISDKEAVPKESKPPKPADEEIGIIQTSTEHTFSEQKDQEPTTDMLKQDSFPVSLEQAVTDSAMTSKTLEKAMTEPSALIEKSSIQELFEMRVDDKDKIEGVGAATSAELDMPFYEDKSGMSKYFETSALKEEATKSIEPGSDYYELSDTRESVHESIDTMSPMHKNGDKEFQTGKESQPSPPAQEAGYSTLAQSYPSDLPEEPSSPQERMFTIDPKVYGEKRDLHSKNKDDLTLSRSLGLGGRSAIEQRSMSINLPMSCLDSIALGFNFGRGHDLSPLASDILTNTSGSMDEGDDYLPATTPALEKAPCFPVESKEEEQIEKVKATGEESTQAEISCESPFLAKDFYKNGTVMAPDLPEMLDLAGTRSRLASVSADAEVARRKSVPSETVVEDSRTGLPPVTDENHVIVKTDSQLEDLGYCVFNKYTVPLPSPVQDSENLSGESGTFYEGTDDKVRRDLATDLSLIEVKLAAAGRVKDEFSVDKEASAHISGDKSGLSKEFDQEKKANDRLDTVLEKSEEHADSKEHAKKTEEAGDEIETFGLGVTYEQALAKDLSIPTDASSEKAEKGLSSVPEIAEVEPSKKVEQGLDFAVQGQLDVKISDFGQMASGLNIDDRRATELKLEATQDMTPSSKAPQEADAFMGVESGHMKEGTKVSETEVKEKVAKPDLVHQEAVDKEESYESSGEHESLTMESLKADEGKKETSPESSLIQDEIAVKLSVEIPCPPAVSEADLATDERADVQMEFIQGPKEESKETPDISITPSDVAEPLHETIVSEPAEIQSEEEEIEAQGEYDKLLFRSDTLQITDLGVSGAREEFVETCPSEHKGVIESVVTIEDDFITVVQTTTDEGESGSHSVRFAALEQPEVERRPSPHDEEEFEVEEAAEAQAEPKDGSPEAPASPEREEVALSEYKTETYDDYKDETTIDDSIMDADSLWVDTQDDDRSIMTEQLETIPKEEKAEKEARRSSLEKHRKEKPFKTGRGRISTPERKVAKKEPSTVSRDEVRRKKAVYKKAELAKKTEVQAHSPSRKFILKPAIKYTRPTHLSCVKRKTTAAGGESALAPSVFKQAKDKVSDGVTKSPEKRSSLPRPSSILPPRRGVSGDRDENSFSLNSSISSSARRTTRSEPIRRAGKSGTSTPTTPGSTAITPGTPPSYSSRTPGTPGTPSYPRTPHTPGTPKSAILVPSEKKVAIIRTPPKSPATPKQLRLINQPLPDLKNVKSKIGSTDNIKYQPKGGQVQIVTKKIDLSHVTSKCGSLKNIRHRPGGGRVKIESVKLDFKEKAQAKVGSLDNAHHVPGGGNVKIDSQKLNFREHAKARVDHGAEIITQSPGRSSVASPRRLSNVSSSGSINLLESPQLATLAEDVTAALAKQGL

SEQ ID NO: 505 - protein, 360 aa, Homo sapiens [sequence omitted]

SEQ ID NO: 506 - protein, 367 aa, Homo sapiens
MSSPPPARSGFYRQEVTKTAWEVRAVYRDLQPVGSGAYGAVCSAVDGRTGAKVAIKKLYRPFQSELFAKRAYRELRLLKHMRHENVIGLLDVFTPDETLDDFTDFYLVMPFMGTDLGKLMKHEKLGEDRIQFLVYQMLKGLRYIHAAGIIHRDLKPGNLAVNEDCELKILDFGLARQADSEMTGYVVTRWYRAPEVILNWMRYTQTVDIWSVGCIMAEMITGKTLFKGSDHLDQLKEIMKVTGTPPAEFVQRLQSDEAKNYMKGLPELEKKDFASILTNASPLAVNLLEKMLVLDAEQRVTAGEALAHPYFESLHDTEDEPQVQKYDDSFDDVDRTLDEWKRVTYKEVLSFKPPRQLGARVSKETPL

SEQ ID NO: 507 - protein, 379 aa, Homo sapiens
MAAAAAQGGGGGEPRRTEGVGPGVPGEVEMVKGQPFDVGPRYTQLQYIGEGAYGMVSSAYDHVRKTRVAIKKISPFEHQTYCQRTLREIQILLRFRHENVIGIRDILRASTLEAMRDVYIVQDLMETDLYKLLKSQQLSNDHICYFLYQILRGLKYIHSANVLHRDLKPSNLLINTTCDLKICDFGLARIADPEHDHTGFLTEYVATRWYRAPEIMLNSKGYTKSIDIWSVGCILAEMLSNRPIFPGKHYLDQLNHILGILGSPSQEDLNCIINMKARNYLQSLPSKTKVAWAKLFPKSDSKALDLLDRMLTFNPNKRITVEEALAHPYLEQYYDPTDEPVAEEPFTFAMELDDLPKERLKELIFQETARFQPGVLEAP

SEQ ID NO: 508 - protein, 824 aa, Homo sapiens
MADRAEMFSLSTFHSLSPPGCRPPQDISLEEFDDEDLSEITDDCGLGLSYDSDHCEKDSLSLGRSEQPHPICSFQDDFQEFEMIDDNEEEDDEDEEEEEEEEEGDGEGQEGGDPGSEAPAPGPLIPSPSVEEPHKHRPTTLRLTTLGAQDSLNNNGGFDLVRPASWQETALCSPAPEALRELPGPLPATDTGPGGAQSPVRPGCDCEGNRPAEPPAPGGTSPSSDPGIEADLRSRSSGGRGGRRSSQELSSPGSDSEDAGGARLGRMISSISETELELSSDGGSSSSGRSSHLTNSIEEASSPASEPEPPREPPRRPAFLPVGPDDTNSEYESGSESEPDLSEDADSPWLLSNLVSRMISEGSSPIRCPGQCLSPAPRPPGEPVSPAGGAAQDSQDPEAAAGPGGVELVDMETLCAPPPPAPAAPRPGPAQPGPCLFLSNPTRDTITPLWAAPGRAARPGRACSAACSEEEDEEDDEEEEDAEDSAGSPGGRGTGPSAPRDASLVYDAVKYTLVVDEHTQLELVSLRRCAGLGHDSEEDSGGEASEEEAGAALLGGGQVSGDTSPDSPDLTFSKKFLNVFVNSTSRSSSTESFGLFSCLVNGEEREQTHRAVFRFIPRHPDELELDVDDPVLVEAEEDDFWFRGFNMRTGERGVFPAFYAHAVPGPAKDLLGSKRSPCWVERFDVQFLGSVEVPCHQGNGILCAAMQKIATARKLTVHLRPPASCDLEISLRGVKLSLSGGGPEFQRCSHFFQMKNISFCGCHPRNSCYFGFITKHPLLSRFACHVFVSQESMRPVAQSVGRAFLEYYQEHLAYACPTEDIYLE

SEQ ID NO: 509 - protein, 795 aa, Homo sapiens
MSARTPLPTVNERDTENHTSVDGYTEPHIQPTKSSSRQNIPRCRNSITSATDEQPHIGNYRLQKTIGKGNFAKVKLARHVLTGREVAVKIIDKTQLNPTSLQKLFREVRIMKILNHPNIVKLFEVIETEKTLYLVMEYASGGEVFDYLVAHGRMKEKEARAKFRQIVSAVQYCHQKYIVHRDLKAENLLLDGDMNIKIADFGFSNEFTVGNKLDTFCGSPPYAAPELFQGKKYDGPEVDVWSLGVILYTLVSGSLPFDGQNLKELRERVLRGKYRIPFYMSTDCENLLKKLLVLNPIKRGSLEQIMKDRWMNVGHEEEELKPYTEPDPDFNDTKRIDIMVTMGFARDEINDALINQKYDEVMATYILLGRKPPEFEGGESLSSGNLCQRSRPSSDLNNSTLQSPAHLKVQRSISANQKQRRFSDHAGPSIPPAVSYTKRPQANSVESEQKEEWDKDVARKLGSTTVGSKSEMTASPLVGPERKKSSTIPSNNVYSGGSMARRNTYVCERTTDRYVALQNGKDSSLTEMSVSSISSAGSSVASAVPSARPRHQKSMSTSGHPIKVTLPTIKDGSEAYRPGTTQRVPAASPSAHSISTATPDRTRFPRGSSSRSTFHGEQLRERRSVAYNGPPASPSHETGAFAHARRGTSTGIISKITSKFVRRDPSEGEASGRTDTSRSTSGEPKERDKEEGKDSKPRSLRFTWSMKTTSSMDPNDMMREIRKVLDANNCDYEQKERFLLFCVHGDARQDSLVQWEMEVCKLPRLSLNGVRFKRISGTSIAFKNIASKIANELKL

SEQ ID NO: 510 - protein, 655 aa, Homo sapiens
MAEDWLDCPALGPGWKRREVFRKSGATCGRSDTYYQSPTGDRIRSKVELTRYLGPACDLTLFDFKQGILCYPAPKAHPVAVASKKRKKPSRPAKTRKRQVGPQSGEVRKEAPRDETKADTDTAPASFPAPGCCENCGISFSGDGTQRQRLKTLCKDCRAQRIAFNREQRMFKRVGCGECAACQVTEDCGACSTCLLQLPHDVASGLFCKCERRRCLRIVERSRGCGVCRGCQTQEDCGHCPICLRPPRPGLRRQWKCVQRRCLRGKHARRKGGCDSKMAARRRPGAQPLPPPPPSQSPEPTEPHPRALAPSPPAEFIYYCVDEDELQPYTNRRQNRKCGACAACLRRMDCGRCDFCCDKPKFGGSNQKRQKCRWRQCLQFAMKRLLPSVWSESEDGAGSPPPYRRRKRPSSARRHHLGPTLKPTLATRTAQPDHTQAPTKQEAGGGFVLPPPGTDLVFLREGASSPVQVPGPVAASTEALLQEAQCSGLSWVVALPQVKQEKADTQDEWTPGTAVLTSPVLVPGCPSKAVDPGLPSVKQEPPDPEEDKEENKDDSASKLAPEEEAGGAGTPVITEIFSLGGTRFRDTAVWLPSLQGRHSGREDGCKVWETEDTVEPTSTSWNPRGWPGTHVSLSPPPASMMWVSCRRSWCPSSQS

SEQ ID NO: 511 - protein, 291 aa, Homo sapiens
MERKRWECPALPQGWEREEVPRRSGLSAGHRDVFYYSPSGKKFRSKPQLARYLGGSMDLSTFDFRTGKMLMSKMNKSRQRVRYDSSNQVKGKPDLNTALPVRQTASIFKQPVTKITNHPSNKVKSDPQKAVDQPRQLFWEKKLSGLNAFDIAEELVKTMDLPKGLQGVGPGCTDETLLSAIASALHTSTMPITGQLSAAVEKNPGVWLNTTQPLCKAFMVTDEDIRKQEELVQQVRKRLEEALMADMLAHVEELARDGEAPLDKACAEDDDEEDEEEEEEEPDPDPEMEHV

SEQ ID NO: 512 - protein, 580 aa, Homo sapiens
MGTTGLESLSLGDRGAAPTVTSSERLVPDPPNDLRKEDVAMELERVGEDEEQMMIKRSSECNPLLQEPIASAQFGATAGTECRKSVPCGWERVVKQRLFGKTAGRFDVYFISPQGLKFRSKSSLANYLHKNGETSLKPEDFDFTVLSKRGIKSRYKDCSMAALTSHLQNQSNNSNWNLRTRSKCKKDVFMPPSSSSELQESRGLSNFTSTHLLLKEDEGVDDVNFRKVRKPKGKVTILKGIPIKKTKKGCRKSCSGFVQSDSKRESVCNKADAESEPVAQKSQLDRTVCISDAGACGETLSVTSEENSLVKKKERSLSSGSNFCSEQKTSGIINKFCSAKDSEHNEKYEDTFLESEEIGTKVEVVERKEHLHTDILKRGSEMDNNCSPTRKDFTGEKIFQEDTIPRTQIERRKTSLYFSSKYNKEALSPPRRKAFKKWTPPRSPFNLVQETLFHDPWKLLIATIFLNRTSGKMAIPVLWKFLEKYPSAEVARTADWRDVSELLKPLGLYDLRAKTIVKFSDEYLTKQWKYPIELHGIGKYGNDSYRIFCVNEWKQVHPEDHKLNKYHDWLWENHEKLSLS

SEQ ID NO: 513 - protein, 1494 aa, Homo sapiens
MNGGKECDGGDKEGGLPAIQVPVGWQRRVDQNGVLYVSPSGSLLSCLEQVKTYLLTDGTCKCGLECPLILPKVFNFDPGAAVKQRTAEDVKADEDVTKLCIHKRKIIAVATLHKSMEAPHPSLVLTSPGGGTNATPVVPSRAATPRSVRNKSHEGITNSVMPECKNPFKLMIGSSNAMGRLYVQELPGSQQQELHPVYPRQRLGSSEHGQKSPFRGSHGGLPSPASSGSQIYGDGSISPRTDPLGSPDVFTRSNPGFHGAPNSSPIHLNRTPLSPPSVMLHGSPVQSSCAMAGRTNIPLSPTLTTKSPVMKKPMCNFSTNMEIPRAMFHHKPPQGPPPPPPPSCALQKKPLTSEKDPLGILDPIPSKPVNQNPVIINPTSFHSNVHSQVPMMNVSMPPAVVPLPSNLPLPTVKPGHMNHGSHVQRVQHSASTSLSPSPVTSPVHMMGTGIGRIEASPQRSRSSSTSSDHGNFMMPPVGPQATSSGIKVPPRSPRSTIGSPRPSMPSSPSTKSDGHHQYKDIPNPLIAGISNVLNTPSSAAFPTASAGSSSVKSQPGLLGMPLNQILNQHNAASFPASSLLSAAAKAQLANQNKLAGNNSSSSSNSGAVAGSGNTEGHSTLNTMFPPTANMLLPTGEGQSGRAALRDKLMSQQKDALRKRKQPPTTVLSLLRQSQMDSSAVPKPGPDLLRKQGQGSFPISSMSQLLQSMSCQSSHLSSNSTPGCGASNTALPCSANQLHFTDPSMNSSVLQNIPLRGEAVHCHNANTNFVHSNSPVPNHHLAGLINQIQASGNCGMLSQSGMALGNSLHPNPPQSRISTSSTPVIPNSIVSSYNQTSSEAGGSGPSSSIAIAGTNHPAITKTTSVLQDGVIVTTAAGNPLQSQLPIGSDFPFVGQEHALHFPSNSTSNNHLPHPLNPSLLSSLPISLPVNQQHLLNQNLLNILQPSAGEGDMSSINNTLSNHQLTHLQSLLNNNQMFPPNQQQQQLLQGYQNLQAFQGQSTIPCPANNNPMACLFQNFQVRMQEDAALLNKRISTQPGLTALPENPNTTLPPFQDTPCELQPRIDPSLGQQVKDGLVVGGPGDASVDAIYKAVVDAASKGMQVVITTAVNSTTQISPIPALSAMSAFTASIGDPLNLSSAVSAVIHGRNMGGVDHDGRLRNSRGARLPKNLDHGKNVNEGDGFEYFKSASCHTSKKQWDGEQSPRGERNRWKYEEFLDHPGHIHSSPCHERPNNVSTLPFLPGEQHPILLPPRNCPGDKILEENFRYNNYKRTMMSFKERLENTVERCAHINGNRPRQSRGFGELLSTAKQDLVLEEQSPSSSNSLENSLVKDYIHYNGDFNAKSVNGCVPSPSDAKSISSEDDLRNPDSPSSNELIHYRPRTFNVGDLVWGQIKGLTSWPGKLVREDDVHNSCQQSPEEGKVEPEKLKTLTEGLEAYSRVRKRNRKSGKLNNHLEAAIHEAMSELDKMSGTVHQIPQGDRQMRPPKPKRRKISR

SEQ ID NO: 514 - protein, 1003 aa, Homo sapiens
MNGGNESSGADRAGGPVATSVPIGWQRCVREGAVLYISPSGTELSSLEQTRSYLLSDGTCKCGLECPLNVPKVFNFDPLAPVTPGGAGVGPASEEDMTKLCNHRRKAVAMATLYRSMETTCSHSSPGEGASPQMFHTVSPGPPSARPPCRVPPTTPLNGGPGSLPPEPPSVSQAFPTLAGPGGLFPPRLADPVPSGGSSSPRFLPRGNAPSPAPPPPPAISLNAPSYNWGAALRSSLVPSDLGSPPAPHASSSPPSDPPLFHCSDALTPPPLPPSNNLPAHPGPASQPPVSSATMHLPLVLGPLGGAPTVEGPGAPPFLASSLLSAAAKAQHPPLPPPSTLQGRRPRAQAPSASHSSSLRPSQRRPRRPPTVFRLLEGRGPQTPRRSRPRAPAPVPQPFSLPEPSQPILPSVLSLLGLPTPGPSHSDGSFNLLGSDAHLPPPPTLSSGSPPQPRHPIQPSLPGTTSGSLSSVPGAPAPPAASKAPVVPSPVLQSPSEGLGMGAGPACPLPPLAGGEAFPFPSPEQGLALSGAGFPGMLGALPLPLSLGQPPPSPLLNHSLFGVLTGGGGQPPPEPLLPPPGGPGPPLAPGEPEGPSLLVASLLPPPPSDLLPPPSAPPSNLLASFLPLLALGPTAGDGEGSAEGAGGPSGEPFSGLGDLSPLLFPPLSAPPTLIALNSALLAATLDPPSGTPPQPCVLSAPQPGPPTSSVTTATTDPGASSLGKAPSNSGRPPQLLSPLLGASLLGDLSSLTSSPGALPSLLQPPGPLLSGQLGLQLLPGGGAPPPLSEASSPLACLLQSLQIPPEQPEAPCLPPESPASALEPEPARPPLSALAPPHGSPDPPVPELLTGRGSGKRGRRGGGGLRGINGEARPARGRKPGSRREPGRLALKWGTRGGFNGQMERSPRRTHHWQHNGELAEGGAEPKDPPPPGPHSEDLKVPPGVVRKSRRGRRRKYNPTRNSNSSRQDITLEPSPTARAAVPLPPRARPGRPAKNKRRKLAP

SEQ ID NO: 515 - protein, 472 aa, Homo sapiens
MSPEEWTYLVVLLISIPIGFLFKKAGPGLKRWGAAAVGLGLTLFTCGPHTLHSLVTILGTWALIQAQPCSCHALALAWTFSYLLFFRALSLLGLPTPTPFTNAVQLLLTLKLVSLASEVQDLHLAQRKEMASGFSKGPTLGLLPDVPSLMETLSYSYCYVGIMTGPFFRYRTYLDWLEQPFPGAVPSLRPLLRRAWPAPLFGLLFLLSSHLFPLEAVREDAFYARPLPARLFYMIPVFFAFRMRFYVAWIAAECGCIAAGFGAYPVAAKARAGGGPTLQCPPPSSPEKAASLEYDYETIRNIDCYSTDFCVRVRDGMRYWNMTVQWWLAQYIYKSAPARSYVLRSAWTMLLSAYWHGLHPGYYLSFLTIPLCLAAEGRLESALRGRLSPGGQKAWDWVHWFLKMRAYDYMCMGFVLLSLADTLRYWASIYFCIHFLALAALGLGLALGGGSPSRRKAASQPTSLAPEKLREE

SEQ ID NO: 516-524 - skipped (9 entries)

SEQ ID NO: 525 - protein, 332 aa, Homo sapiens [sequence omitted]

SEQ ID NO: 526 - protein, 1019 aa, Homo sapiens
MMAAAAAAAAGSSSSGGGGGGSGSSSSSSDTSSTGEEERMRRLFQTCDGDGDGYISRNDLLMVCRQLNMEESVAEIMNQLGADENGKISFQDFTRCRMQLVREIRKEEVDLSAKSDNSCTKKLRDRIASWPTSSDNSLGALSAARESWEYDSGARDLQSPDVQSQSALQKLLEYGGSSLHQQAALHKLLTQSPHIGNSVGGSYLELANTLHSAALASLKGDIVELNKRLQQTERERDLLEKKLAKAQCEQSHLMREHEDVQERTTLRYEERITELHSVIAELNKKIDRLQGTTIREEDEYSELRSELSQSQHEVNEDSRSMDQDQTSVSIPENQSTMVTADMDNCSDLNSELQRVLTGLENVVCGRKKSSCSLSVAEVDRHIEQLTTASEHCDLAIKTVEEIEGVLGRDLYPNLAEERSRWEKELAGLREENESLTAMLCSKEEELNRTKATMNAIREERDRLRRRVRELQTRLQSVQATGPSSPGRLTSTNRPINPSTGELSTSSSSNDIPIAKIAERVKLSKTRSESSSSDRPVLGSEISSIGVSSSVAEHLAHSLQDCSNIQEIFQTLYSHGSAISESKIREFEVETERLNSRIEHLKSQNDLLTITLEECKSNAERMSMLVGKYESNATALRLALQYSEQCIEAYELLLALAESEQSLILGQFRAAGVGSSPGDQSGDENITQMLKRAHDCRKTAENAAKALLMKLDGSCGGAFAVAGCSVQPWESLSSNSHTSTTSSTASSCDTEFTKEDEQRLKDYIQQLKNDRAAVKLTMLELESIHIDPLSYDVKPRGDSQRLDLENAVLMQELMAMKEEMAELKAQLYLLEKEKKALELKLSTREAQEQAYLVHIEHLKSEVEEQKEQRMRSLSSTSSGSKDKPGKECADAASPALSLAELRTTCSENELAAEFTNAIRREKKLKARVQELVSALERLTKSSEIRHQQSAEFVNDLKRANSNLVAAYEKAKKKHQNKLKKLESQMMAMVERHETQVRMLKQRIALLEEENSRPHTNETSL

SEQ ID NO: 527 - protein, 863 aa, Homo sapiens
MSSPASTPSRRGSRRGRATPAQTPRSEDARSSPSQRRRGEDSTSTGELQPMPTSPGVDLQSPAAQDVLFSSPPQMHSSAIPLDFDVSSPLTYGTPSSRVEGTPRSGVRGTPVRQRPDLGSAQKGLQVDLQSDGAAAEDIVASEQSLGQKLVIWGTDVNVAACKENFQRFLQRFIDPLAKEEENVGIDITEPLYMQRLGEINVIGEPFLNVNCEHIKSFDKNLYRQLISYPQEVIPTFDMAVNEIFFDRYPDSILEHQIQVRPFNALKTKNMRNLNPEDIDQLITISGMVIRTSQLIPEMQEAFFQCQVCAHTTRVEMDRGRIAEPSVCGRCHTTHSMALIHNRSLFSDKQMIKLQESPEDMPAGQTPHTVILFAHNDLVDKVQPGDRVNVTGIYRAVPIRVNPRVSNVKSVYKTHIDVIHYRKTDAKRLHGLDEEAEQKLFSEKRVELLKELSRKPDIYERLASALAPSIYEHEDIKKGILLQLFGGTRKDFSHTGRGKFRAEINILLCGDPGTSKSQLLQYVYNLVPRGQYTSGKGSSAVGLTAYVMKDPETRQLVLQTGALVLSDNGICCIDEFDKMNESTRSVLHEVMEQQTLSIAKAGIICQLNARTSVLAAANPIESQWNPKKTTIENIQLPHTLLSRFDLIFLLLDPQDEAYDRRLAHHLVALYYQSEEQAEEELLDMAVLKDYIAYAHSTIMPRLSEEASQALIEAYVDMRKIGSSRGMVSAYPRQLESLIRLAEAHAKVRLSNKVEAIDVEEAKRLHREALKQSATDPRTGIVDISILTTGMSATSRKRKEELAEALKKLILSKGKTPALKYQQLFEDIRGQSDIAITKDMFEEALRALADDDFLTVTGKTVRLL

SEQ ID NO: 528 - protein, 835 aa, Homo sapiens
MAAPILKDVVAYVEVWSSNGTENYSKTFTTQLVDMGAKVSKTFNKQVTHVIFKDGYQSTWDKAQKRGVKLVSVLWVEKCRTAGAHIDESLFPAANMNEHLSSLIKKKRKCMQPKDFNFKTPENDKRFQKKFEKMAKELQRQKTNLDDDVPILLFESNGSLIYTPTIEINSSHHSAMEKRLQEMKEKRENLSPTSSQMIQQSHDNPSNSLCEAPLNISRDTLCSDEYFAGGLHSSFDDLCGNSGCGNQERKLEGSINDIKSDVCISSLVLKANNIHSSPSFTHLDKSSPQKFLSNLSKEEINLQRNIAGKVVTPDQKQAAGMSQETFEEKYRLSPTLSSTKGHLLIHSRPRSSSVKRKRVSHGSHSPPKEKCKRKRSTRRSIMPRLQLCRSEDRLQHVAGPALEALSCGESSYDDYFSPDNLKERYSENLPPESQLPSSPAQLSCRSLSKKERTSIFEMSDFSCVGKKTRTVDITNFTAKTISSPRKTGNGEGRATSSCVTSAPEEALRCCRQAGKEDACPEGNGFSYTIEDPALPKGHDDDLTPLEGSLEEMKEAVGLKSTQNKGTTSKISNSSEGEAQSEHEPCFIVDCNMETSTEEKENLPGGYSGSVKNRPTRHDVLDDSCDGFKDLIKPHEELKKSGRGKKPTRTLVMTSMPSEKQNVVIQVVDKLKGFSIAPDVCETTTHVLSGKPLRTLNVLLGIARGCWVLSYDWVLWSLELGHWISEEPFELSHHFPAAPLCRSECHLSAGPYRGTLFADQPAMFVSPASSPPVAKLCELVHLCGGRVSQVPRQASIVIGPYSGKKKATVKYLSEKWVLDSITQHKVCAPENYLLSQ

SEQ ID NO: 529 - protein, 1025 aa, Homo sapiens
MSVWSAGLLRSARRRRRGRTDGRRFLLRRAVPGHLGLARARVERAWLAAGLLKVPLRTPWAGYVHVHVKMDLLYGLVWLLTVLLEGISGQGVYAPPTVRIVHSGLACNIEEERYSERVYTIREGETLELTCLVTGHPRPQIRWTKTAGSASDRFQDSSVFNETLRITNIQRHQGGRYYCKAENGLGSPAIKSIRVDVYYLDDPVVTVHQSIGEAKEQFYYERTVFLRCVANSNPPVRYSWRRGQEVLLQGSDKGVEIYEPFFTQGETKILKLKNLRPQDYANYSCIASVRNVCNIPDKMVSFRLSNKTASPSIKLLVDDPIVVNPGEAITLVCVTTGGEPAPSLTWVRSFGTLPEKTVLNGGTLTIPAITSDDAGTYSCIANNNVGNPAKKSTNIIVRALKKGRFWITPDPYHKDDNIQIGREVKISCQVEAVPSEELTFSWFKNGRPLRSSERMVITQTDPDVSPGTTNLDIIDLKFTDFGTYTCVASLKGGGISDISIDVNISSSTVPPNLTVPQEKSPLVTREGDTIELQCQVTGKPKPIILWSRADKEVAMPDGSMQMESYDGTLRIVNVSREMSGMYRCQTSQYNGFNVKPREALVQLIVQYPPAVEPAFLEIRQGQDRSVTMSCRVLRAYPIRVLTYEWRLGNKLLRTGQFDSQEYTEYAVKSLSNENYGVYNCSIINEAGAGRCSFLVTGKAYAPEFYYDTYNPVWQNRHRVYSYSLQWTQMNPDAVDRIVAYRLGIRQAGQQRWWEQEIKINGNIQKGELITYNLTELIKPEAYEVRLTPLTKFGEGDSTIRVIKYSAPVNPHLREFHCGFEDGNICLFTQDDTDNFDWTKQSTATRNTKYTPNTGPNADRSGSKEGFYMYIETSRPRLEGEKARLLSPVFSIAPKNPYGPTNTAYCFSFFYHMYGQHIGVLNVYLRLKGQTTIENPLWSSSGNKGQRWNEAHVNIYPITSFQLIFEGIRGPGIEGDIAIDDVSIAEGECAKQDLATKNSVDGAVGILVHIWLFPIIVLISILSPRR

SEQ ID NO: 530 - protein, 498 aa, Homo sapiens [sequence omitted]

SEQ ID NO: 531 - protein, 2177 aa, Homo sapiens
MAAFGILSYEHRPLKRPRLGPPDVYPQDPKQKEDELTALNVKQGFNNQPAVSGDEHGSAKNVSFNPAKISSNFSSIIAEKLRCNTLPDTGRRKPQVNQKDNFWLVTARSQSAINTWFTDLAGTKPLTQLAKKVPIFSKKEEVFGYLAKYTVPVMRAAWLIKMTCAYYAAISETKVKKRHVDPFMEWTQIITKYLWEQLQKMAEYYRPGPAGSGGCGSTIGPLPHDVEVAIRQWDYTEKLAMFMFQDGMLDRHEFLTWVLECFEKIRPGEDELLKLLLPLLLRYSGEFVQSAYLSRRLAYFCTRRLALQLDGVSSHSSHVISAQSTSTLPTTPAPQPPTSSTPSTPFSDLLMCPQHRPLVFGLSCILQTILLCCPSALVWHYSLTDSRIKTGSPLDHLPIAPSNLPMPEGNSAFTQQVRAKLREIEQQIKERGQAVEVRWSFDKCQEATAGFTIGRVLHTLEVLDSHSFERSDFSNSLDSLCNRIFGLGPSKDGHEISSDDDAVVSLLCEWAVSCKRSGRHRAMVVAKLLEKRQAEIEAERCGESEAADEKGSIASGSLSAPSAPIFQDVLLQFLDTQAPMLTDPRSESERVEFFNLVLLFCELIRHDVFSHNMYTCTLISRGDLAFGAPGPRPPSPFDDPADDPEHKEAEGSSSSKLEDPGLSESMDIDPSSSVLFEDMEKPDFSLFSPTMPCEGKGSPSPEKPDVEKEVKPPPKEKIEGTLGVLYDQPRHVQYATHFPIPQEESCSHECNQRLVVLFGVGKQRDDARHAIKKITKDILKVLNRKGTAETDQLAPIVPLNPGDLTFLGGEDGQKRRRNRPEAFPTAEDIFAKFQHLSHYDQHQVTAQVSRNVLEQITSFALGMSYHLPLVQHVQFIFDLMEYSLSISGLIDFAIQLLNELSVVEAELLLKSSDLVGSYTTSLCLCIVAVLRHYHACLILNQDQMAQVFEGLCGVVKHGMNRSDGSSAERCILAYLYDLYTSCSHLKNKFGELFSDFCSKVKNTIYCNVEPSESNMRWAPEFMIDTLENPAAHTFTYTGLGKSLSENPANRYSFVCNALMHVCVGHHDPDRVNDIAILCAELTGYCKSLSAEWLGVLKALCCSSNNGTCGFNDLLCNVDVSDLSFHDSLATFVAILIARQCLLLEDLIRCAAIPSLLNAACSEQDSEPGARLTCRILLHLFKTPQLNPCQSDGNKPTVGIRSSCDRHLLAASQNRIVDGAVFAVLKAVFVLGDAELKGSGFTVTGGTEELPEEEGGGGSGGRRQGGRNISVETASLDVYAKYVLRSICQQEWVGERCLKSLCEDSNDLQDPVLSSAQAQRLMQLICYPHRLLDNEDGENPQRQRIKRILQNLDQWTMRQSSLELQLMIKQTPNNEMNSLLENIAKATIEVFQQSAETGSSSGSTASNMPSSSKTKPVLSSLERSGVWLVAPLIAKLPTSVQGHVLKAAGEELEKGQHLGSSSRKERDRQKQKSMSLLSQQPFLSLVLTCLKGQDEQREGLLTSLYSQVHQIVNNWRDDQYLDDCKPKQLMHEALKLRLNLVGGMFDTVQRSTQQTTEWAMLLLEIIISGTVDMQSNNELFTTVLDMLSVLINGTLAADMSSISQGSMEENKRAYMNLAKKLQKELGERQSDSLEKVRQLLPLPKQTRDVITCEPQGSLIDTKGNKIAGFDSIFKKEGLQVSTKQKISPWDLFEGLKPSAPLSWGWFGTVRVDRRVARGEEQQRLLLYHTHLRPRPRAYYLEPLPLPPEDEEPPAPTLLEPEKKAPEPPKTDKPGAAPPSTEERKKKSTKGKKRSQPATKTEDYGMGPGRSGPYGVTVPPDLLHHPNPGSITHLNYRQGSIGLYTQNQPLPAGGPRVDPYRPVRLPMQKLPTRPTYPGVLPTTMTGVMGLEPSSYKTSVYRQQQPAVPQGQRLRQQLQQSQGMLGQSSVHQMTPSSSYGLQTSQGYTPYVSHVGLQQHTGPAGTMVPPSYSSQPYQSTHPSTNPTLVDPTRHLQQRPSGYVHQQAPTYGHGLTSTQRFSHQTLQQTPMISTMTPMSAQGVQAGVRSTAILPEQQQQQQQQQQQQQQQQQQQQQQQQQQYHIRQQQQQQILRQQQQQQQQQQQQQQQQQQQQQQQQQQHQQQQQQQAAPPQPQPQSQPQFQRQGLQQTQQQQQTAALVRQLQQQLSNTQPQPSTNIFGRY

SEQ ID NO: 532 - protein, 2210 aa, Homo sapiens
MTAAANWVANGASLEDCHSNLFSLAELTGIKWRRYNFGGHGDCGPIISAPAQDDPILLSFIRCLQANLLCVWRRDVKPDCKELWIFWWGDEPNLVGVIHHELQVVEEGLWENGLSYECRTLLFKAIHNLLERCLMDKNFVRIGKWFVRPYEKDEKPVNKSEHLSCAFTFFLHGESNVCTSVEIAQHQPIYLINEEHIHMAQSSPAPFQVLVSPYGLNGTLTGQAYKMSDPATRKLIEEWQYFYPMVLKKKEESKEEDELGYDDDFPVAVEVIVGGVRMVYPSAFVLISQNDIPVPQSVASAGGHIAVGQQGLGSVKDPSNCGMPLTPPTSPEQAILGESGGMQSAASHLVSQDGGMITMHSPKRSGKIPPKLHNHMVHRVWKECILNRTQSKRSQMSTPTLEEEPASNPATWDFVDPTQRVSCSCSRHKLLKRCAVGPNRPPTVSQPGFSAGPSSSSSLPPPASSKHKTAERQEKGDKLQKRPLIPFHHRPSVAEELCMEQDTPGQKLGLAGIDSSLEVSSSRKYDKQMAVPSRNTSKQMNLNPMDSPHSPISPLPPTLSPQPRGQETESLDPPSVPVNPALYGNGLELQQLSTLDDRTVLVGQRLPLMAEVSETALYCGIRPSNPESSEKWWHSYRLPPSDDAEFRPPELQGERCDAKMEVNSESTALQRLLAQPNKRFKIWQDKQPQLQPLHFLDPLPLSQQPGDSLGEVNDPYTFEDGDIKYIFTANKKCKQGTEKDSLKKNKSEDGFGTKDVTTPGHSTPVPDGKNAMSIFSSATKTDVRQDNAAGRAGSSSLTQVTDLAPSLHDLDNIFDNSDDDELGAVSPALRSSKMPAVGTEDRPLGKDGRAAVPYPPTVADLQRMFPTPPSLEQHPAFSPVMNYKDGISSETVTALGMMESPMVSMVSTQLTEFKMEVEDGLGSPKPEEIKDFSYVHKVPSFQPFVGSSMFAPLKMLPSHCLLPLKIPDACLFRPSWAIPPKIEQLPMPPAATFIRDGYNNVPSVGSLADPDYLNTPQMNTPVTLNSAAPASNSGAGVLPSPATPRFSVPTPRTPRTPRTPRGGGTASGQGSVKYDSTDQGSPASTPSTTRPLNSVEPATMQPIPEAHSLYVTLILSDSVMNIFKDRNFDSCCICACNMNIKGADVGLYIPDSSNEDQYRCTCGFSAIMNRKLGYNSGLFLEDELDIFGKNSDIGQAAERRLMMCQSTFLPQVEGTKKPQEPPISLLLLLQNQHTQPFASLNFLDYISSNNRQTLPCVSWSYDRVQADNNDYWTECFNALEQGRQYVDNPTGGKVDEALVRSATVHSWPHSNVLDISMLSSQDVVRMLLSLQPFLQDAIQKKRTGRTWENIQHVQGPLTWQQFHKMAGRGTYGSEESPEPLPIPTLLVGYDKDFLTISPFSLPFWERLLLDPYGGHRDVAYIVVCPENEALLEGAKTFFRDLSAVYEMCRLGQHKPICKVLRDGIMRVGKTVAQKLTDELVSEWFNQPWSGEENDNHSRLKLYAQVCRHHLAPYLATLQLDSSLLIPPKYQTPPAAAQGQATPGNAGPLAPNGSAAPPAGSAFNPTSNSSSTNPAASSSASGSSVPPVSSSASAPGISQISTTSSSGFSGSVGGQNPSTGGISADRTQGNIGCGGDTDPGQSSSQPSQDGQESVTERERIGIPTEPDSADSHAHPPAVVIYMVDPFTYAAEEDSTSGNFWLLSLMRCYTEMLDNLPEHMRNSFILQIVPCQYMLQTMKDEQVFYIQYLKSMAFSVYCQCRRPLPTQIHIKSLTGFGPAASIEMTLKNPERPSPIQLYSPPFILAPIKDKQTELGETFGEASQKYNVLFVGYCLSHDQRWLLASCTDLHGELLETCVVNIALPNRSRRSKVSARKIGLQKLWEWCIGIVQMTSLPWRVVIGRLGRLGHGELKDWSILLGECSLQTISKKLKDVCRMCGISAADSPSILSACLVAMEPQGSFVVMPDAVTMGSVFGRSTALNMQSSQLNTPQDASCTHILVFPTSSTIQVAPANYPNEDGFSPNNDDMFVDLPFPDDMDNDIGILMTGNLHSSPNSSPVPSPGSPSGIGVGSHFQHSRSQGERLLSREAPEELKQQPLALGYFVSTAKAENLPQWFWSSCPQAQNQCPLFLKASLHHHISVAQTDELLPARNSQRVPHPLDSKTTSDVLRFVLEQYNALSWLTCNPATQDRTSCLPVHFVVLTQLYNAIMNIL

SEQ ID NO: 533 - protein, 483 aa, Homo sapiens
MGRKKIQITRIMDERNRQVTFTKRKFGLMKKAYELSVLCDCEIALIIFNSTNKLFQYASTDMDKVLLKYTEYNEPHESRTNSDIVETLRKKGLNGCDSPDPDADDSALNKKENKGCESPDPDSSYALTPRTEEKYKKINEEFDNMIKSHKIPAVPPPNFEMPVSIPVSSHNSLVYSNPVSSLGNPNLLPLAHPSLQRNSMSPGVTHRPPSAGNTGGLMGGDLTSGAGTSAGNGYGNPRNSPGLLVSPGNLNKNMQAKSPPPMNLGMNNRKPDLRVLIPPGSKNTMPSVNQRINNSQSAQSLATPVVSVATPTLPGQGMGGYPSAISTTYGTEYSLSSADLSSLSGFNTASALHLGSVTGWQQQHLHNMPPSALSQLGACTSTHLSQSSNLSLPSTQSLNIKSEPVSPPRDRTTTPSRYPQHTRHEAGRSPVDSLSSCSSSYDGSDREDHRNEFHSPIGLTRPSPDERESPSVKRMRLSEGWAT

SEQ ID NO: 534 - protein, 1408 aa, Homo sapiens
MKAPAVLAPGILVLLFTLVQRSNGECKEALAKSEMNVNMKYQLPNFTAETPIQNVILHEHHIFLGATNYIYVLNEEDLQKVAEYKTGPVLEHPDCFPCQDCSSKANLSGGVWKDNINMALVVDTYYDDQLISCGSVNRGTCQRHVFPHNHTADIQSEVHCIFSPQIEEPSQCPDCVVSALGAKVLSSVKDRFINFFVGNTINSSYFPDHPLHSISVRRLKETKDGFMFLTDQSYIDVLPEFRDSYPIKYVHAFESNNFIYFLTVQRETLDAQTFHTRIIRFCSINSGLHSYMEMPLECILTEKRKKRSTKKEVFNILQAAYVSKPGAQLARQIGASLNDDILFGVFAQSKPDSAEPMDRSAMCAFPIKYVNDFFNKIVNKNNVRCLQHFYGPNHEHCFNRTLLRNSSGCEARRDEYRTEFTTALQRVDLFMGQFSEVLLTSISTFIKGDLTIANLGTSEGRFMQVVVSRSGPSTPHVNFLLDSHPVSPEVIVEHTLNQNGYTLVITGKKITKIPLNGLGCRHFQSCSQCLSAPPFVQCGWCHDKCVRSEECLSGTWTQQICLPAIYKVFPNSAPLEGGTRLTICGWDFGFRRNNKFDLKKTRVLLGNESCTLTLSESTMNTLKCTVGPAMNKHFNMSIIISNGHGTTQYSTFSYVDPVITSISPKYGPMAGGTLLTLTGNYLNSGNSRHISIGGKTCTLKSVSNSILECYTPAQTISTEFAVKLKIDLANRETSIFSYREDPIVYEIHPTKSFISTWWKEPLNIVSFLFCFASGGSTITGVGKNLNSVSVPRMVINVHEAGRNFTVACQHRSNSEIICCTTPSLQQLNLQLPLKTKAFFMLDGILSKYFDLIYVHNPVFKPFEKPVMISMGNENVLEIKGNDIDPEAVKGEVLKVGNKSCENIHLHSEAVLCTVPNDLLKLNSELNIEWKQAISSTVLGKVIVQPDQNFTGLIAGVVSISTALLLLLGFFLWLKKRKQIKDLGSELVRYDARVHTPHLDRLVSARSVSPTTEMVSNESVDYRATFPEDQFPNSSQNGSCRQVQYPLTDMSPILTSGDSDISSPLLQNTVHIDLSALNPELVQAVQHVVIGPSSLIVHFNEVIGRGHFGCVYHGTLLDNDGKKIHCAVKSLNRITDIGEVSQFLTEGIIMKDFSHPNVLSLLGICLRSEGSPLVVLPYMKHGDLRNFIRNETHNPTVKDLIGFGLQVAKGMKYLASKKFVHRDLAARNCMLDEKFTVKVADFGLARDMYDKEYYSVHNKTGAKLPVKWMALESLQTQKFTTKSDVWSFGVLLWELMTRGAPPYPDVNTFDITVYLLQGRRLLQPEYCPDPLYEVMLKCWHPKAEMRPSFSELVSRISAIFSTFIGEHYVHVNATYVNVKCVAPYPSLLSSEDNADDEVDTRPASFWETS

SEQ ID NO: 535 - protein, 579 aa, Homo sapiens
MKDFSDVILCMEATESSKTEFCNPAFEPESGPPCPPPVFPEDASYSVPAPWHGRRPRGLRPDCRFSWLCVLLLSSLLLLLLGLLVAIILAQLQAAPPSGASHSPLPAGGLTTTTTTPTITTSQAAGTPKGQQESGVSPSPQSTCGGLLSGPRGFFSSPNYPDPYPPNTHCVWHIQVATDHAIQLKIEALSIESVASCLFDRLELSPEPEGPLLRVCGRVPPPTLNTNASHLLVVFVSDSSVEGFGFHAWYQAMAPGRGSCAHDEFRCDQLICLLPDSVCDGFANCADGSDETNCSAKFSGCGGNLTGLQGTFSTPSYLQQYPHQLLCTWHISVPAGHSIELQFHNFSLEAQDECKFDYVEVYETSSSGAFSLLGRFCGAEPPPHLVSSHHELAVLFRTDHGISSGGFSATYLAFNATENPCGPSELSCQAGGCKGVQWMCDMWRDCTDGSDDNCSGPLFPPPELACEPVQVEMCLGLSYNTTAFPNIWVGMITQEEVVEVLSGYKSLTSLPCYQHFRRLLCGLLVPRCTPLGSVLPPCRSVCQEAEHQCQSGLALLGTPWPFNCNRLPEAADLEACAQP

SEQ ID NO: 536 - protein, 1006 aa, Homo sapiens
MSNSRNNRVMVEGVGARVVRGPDWKWGKQDGGEGHVGTVRSFESPEEVVVVWDNGTAANYRCSGAYDLRILDSAPTGIKHDGTMCDTCRQQPIIGIRWKCAECTNYDLCTVCYHGDKHHLRHRFYRITTPGSERVLLESRRKSKKITARGIFAGARVVRGVDWQWEDQDGGNGRRGKVTEIQDWSASSPHSAAYVLWDNGAKNLYRVGFEGMSDLKCVQDAKGGSFYRDHCPVLGEQNGNRNPGGLQIGDLVNIDLDLEIVQSLQHGHGGWTDGMFETLTTTGTVCGIDEDHDIVVQYPSGNRWTFNPAVLTKANIVRSGDAAQGAEGGTSQFQVGDLVQVCYDLERIKLLQRGHGEWAEAMLPTLGKVGRVQQIYSDSDLKVEVCGTSWTYNPAAVSKVASAGSAISNASGERLSQLLKKLFETQESGDLNEELVKAAANGDVAKVEDLLKRPDVDVNGQCAGHTAMQAASQNGHVDILKLLLKQNVDVEAEDKDGDRAVHHAAFGDEGAVIEVLHRGSADLNARNKRRQTPLHIAVNKGHLQVVKTLLDFGCHPSLQDSEGDTPLHDAISKKRDDILAVLLEAGADVTITNNNGFNALHHAALRGNPSAMRVLLSKLPRPWIVDEKKDDGYTALHLAALNNHVEVAELLVHQGNANLDIQNVNQQTALHLAVERQHTQIVRLLVRAGAKLDIQDKDGDTPLHEALRHHTLSQLRQLQDMQDVGKVDAAWEPSKNTLIMGLGTQGAEKKSAASIACFLAANGADLSIRNKKGQSPLDLCPDPNLCKALAKCHKEKVSGQVGSRSPSMISNDSETLEECMVCSDMKRDTLFGPCGHIATCSLCSPRVKKCLICKEQVQSRTKIEECVVCSDKKAAVLFQPCGHMCACENCANLMKKCVQCRAVVERRVPFIMCCGGKSSEDATDDISSGNIPVLQKDKDNTNVNADVQKLQQQLQDIKEQTMCPVCLDRLKNMIFLCGHGTCQLCGDRMSECPICRKAIERRILLY

SEQ ID NO: 537 - protein, 1049 aa, Homo sapiens
MDHTGAIDTEDEVGPLAHLAPSPQSEAVAHEFQELSLQSSQNLPPLNERKNVLQLRLQQRRTREQLVDQGIMPPLKSPAAFHEQIKSLERARTENFLKHKIRSRPDRSELVRMHILEETFAEPSLQATQMKLKRARLADDLNEKIAQRPGPMELVEKNILPVDSSVKEAIIGVGKEDYPHTQGDFSFDEDSSDALSPDQPASQESQGSAASPSEPKVSESPSPVTTNTPAQFASVSPTVPEFLKTPPTADQPPPRPAAPVLPTNTVSSAKPGPALVKQSHPKNPNDKHRSKKCKDPKPRVKKLKYHQYIPPDQKGEKNEPQMDSNYARLLQQQQLFLQLQILSQQKQHYNYQTILPAPFKPLNDKNSNSGNSALNNATPNTPRQNTSTPVRKPGPLPSSLDDLKVSELKTELKLRGLPVSGTKPDLIERLKPYQEVNSSGLAAGGIVAVSSSAIVTSNPEVTVALPVTTLHNTVTSSVSTLKAELPPTGTSNATRVENVHSPLPISPSPSEQSSLSTDDTNMADTFTEIMTMMSPSQFLSSSPLRMTNNEDSLSPTSSTLSNLELDAAEKDRKLQEKEKQIEELKRKLEQEQKLVEVLKMQLEVEKRGQQQRPLEAQPSAPGHSVKSDQKHGSLGSSIKDEASLPDCSSSRQPIPVASHAVGQPVSTGGQTLVAKKAVVIKQEVPVGQAEQQSVVSQFYTSPQAGMQTQPQIATAAQIPTAALASGLAPTVPQTQDTFPQHVLSQPQQVRKVFTNSASSNTVLPYQRHPAPAVQQPFINKASNSVLQSRNAPLPSLQNGPNTPNKPSSPPPPQQFVVQHSLFGSPVAKTKDPPRYEEAIKQTRSTQAPLPEISNAHSQQMDDLFDILIKSGEISLPIKEEPSPISKMRPVTASITTMPVNTVVSRPPPQVQMAPPVSLEPMGSLSASLENQLEAFLDGTLPSANEIPPLQSSSEDREPFSLIEDLQNDLLSHSGMLDHSHSPMETSETQFAAGTPCLSLDLSDSNLDNMEWLDITMPNSSSGLTPLSTTAPSMFSADFLDPQDLPLPWD

SEQ ID NO: 538 - protein, 582 aa, Homo sapiens
MSIETLLEAARFLEWQAQQQQRAREEQERLRLEQEREQEQKKANSLARLAHTLPVEEPRMEAPPLPLSPPAPPPAPPPPLATPAPLTVIPIPVVTNSPQPLPPPPPLPAAAQPLPLAPRQPALVGAPGLSIKEPAPLPSRPQVPTPAPLLPDSKATIPPNGSPKPLQPLPTPVLTIAPHPGVQPQLAPQQPPPPTLGTLKLAPAEEVKSSEQKKRPGGIGTREVHNKLEKNRRAHLKECFETLKRNIPNVDDKKTSNLSVLRTALRYIQSLKRKEKEYEHEMERLAREKIATQQRLAELKHELSQWMDVLEIDRVLRQTGQPEDDQASTSTASEGEDNIDEDMEEDRAGLGPPKLSHRPQPELLKSTLPPPSTTPAPLPPHPHPHPHSVALPPAHLPVQQQQPQQKTPLPAPPPPPAAPAQTLVPAPAHLVATAGGGSTVIAHTATTHASVIQTVNHVLQGPGGKHIAHIAPSAPSPAVQLAPATPPIGHITVHPATLNHVAHLGSQLPLYPQPVAVSHIAHTLSHQQVNGTAGLGPPATVMAKPAVGAQVVHHPQLVGQTVLNPVTMVTMPSFPVSTLKLA

SEQ ID NO: 539 - protein, 888 aa, Homo sapiens
MAGAAAESGRELWTFAGSRDPSAPRLAYGYGPGSLRELRAREFSRLAGTVYLDHAGATLFSQSQLESFTSDLMENTYGNPHSQNISSKLTHDTVEQVRYRILAHFHTTAEDYTVIFTAGSTAALKLVAEAFPWVSQGPESSGSRFCYLTDSHTSVVGMRNVTMAINVISTPVRPEDLWSAEERSASASNPDCQLPHLFCYPAQSNFSGVRYPLSWIEEVKSGRLHPVSTPGKWFVLLDAASYVSTSPLDLSAHQADFVPISFYKIFGFPTGLGALLVHNRAAPLLRKTYFGGGTASAYLAGEDFYIPRQSVAQRFEDGTISFLDVIALKHGFDTLERLTGGMENIKQHTFTLAQYTYVALSSLQYPNGAPVVRIYSDSEFSSPEVQGPIINFNVLDDKGNIIGYSQVDKMASLYNIHLRTGCFCNTGACQRHLGISNEMVRKHFQAGHVCGDNMDLIDGQPTGSVRISFGYMSTLDDVQAFLRFIIDTRLHSSGDWPVPQAHADTGETGAPSADSQADVIPAVMGRRSLSPQEDALTGSRVWNNSSTVNAVPVAPPVCDVARTQPTPSEKAAGVLEGALGPHVVTNLYLYPIKSCAAFEVTRWPVGNQGLLYDRSWMVVNHNGVCLSQKQEPRLCLIQPFIDLRQRIMVIKAKGMEPIEVPLEENSERTQIRQSRVCADRVSTYDCGEKISSWLSTFFGRPCHLIKQSSNSQRNAKKKHGKDQLPGTMATLSLVNEAQYLLINTSSILELHRQLNTSDENGKEELFSLKDLSLRFRANIIINGKRAFEEEKWDEISIGSLRFQVLGPCHRCQMICIDQQTGQRNQHVFQKLSESRETKVNFGMYLMHASLDLSSPCFLSVGSQVLPVLKENVEGHDLPASEKHQDVTS

SEQ ID NO: 540 - protein, 540 aa, Homo sapiens
MQQVLENLTELPSSTGAEEIDLIFLKGIMENPIVKSLAKAHERLEDSKLEAVSDNNLELVNEILEDITPLINVDENVAELVGILKEPHFQSLLEAHDIVASKCYDSPPSSPEMNNSSINNQLLPVDAIRILGIHKRAGEPLGVTFRVENNDLVIARILHGGMIDRQGLLHVGDIIKEVNGHEVGNNPKELQELLKNISGSVTLKILPSYRDTITPQQVFVKCHFDYNPYNDNLIPCKEAGLKFSKGEILQIVNREDPNWWQASHVKEGGSAGLIPSQFLEEKRKAFVRRDWDNSGPFCGTISSKKKKKMMYLTTRNAEFDRHEIQIYEEVAKMPPFQRKTLVLIGAQGVGRRSLKNRFIVLNPTRFGTTVPFTSRKPREDEKDGQAYKFVSRSEMEADIKAGKYLEHGEYEGNLYGTKIDSILEVVQTGRTCILDVNPQALKVLRTSEFMPYVVFIAAPELETLRAMHKAVVDAGITTKLLTDSDLKKTVDESARIQRAYNHYFDLIIINDNLDKAFEKLQTAIEKLRMEPQWVPISWVY

SEQ ID NO: 541 - protein, 577 aa, Homo sapiens
MPKTISVRVTTMDAELEFAIQPNTTGKQLFDQVVKTIGLREVWFFGLQYQDTKGFSTWLKLNKKVTAQDVRKESPLLFKFRAKFYPEDVSEELIQDITQRLFFLQVKEGILNDDIYCPPETAVLLASYAVQSKYGDFNKEVHKSGYLAGDKLLPQRVLEQHKLNKDQWEERIQVWHEEHRGMLREDAVLEYLKIAQDLEMYGVNYFSIKNKKGSELWLGVDALGLNIYEQNDRLTPKIGFPWSEIRNISFNDKKFVIKPIDKKAPDFVFYAPRLRINKRILALCMGNHELYMRRRKPDTIEVQQMKAQAREEKHQKQMERAMLENEKKKREMAEKEKEKIEREKEELMERLKQIEEQTKKAQQELEEQTRRALELEQERKRAQSEAEKLAKERQEAEEAKEALLQASRDQKKTQEQLALEMAELTARISQLEMARQKKESEAVEWQQKAQMVQEDLEKTRAELKTAMSTPHVAEPAENEQDEQDENGAEASADLRADAMAKDRSEEERTTEAEKNERVQKHLKALTSELANARDESKKTANDMIHAENMRLGRDKYKTLRQIRQGNTKQRIDEFESM

SEQ ID NO: 542 - skipped

SEQ ID NO: 543 - protein, 451 aa, Homo sapiens
MEQWDHFHNQQEDTDSCSESVKFDARSMTALLPPNPKNSPSLQEKLKSFKAALIALYLLVFAVLIPLIGIVAAQLLKWETKNCSVSSTNANDITQSLTGKGNDSEEEMRFQEVFMEHMSNMEKRIQHILDMEANLMDTEHFQNFSMTTDQRFNDILLQLSTLFSSVQGHGNAIDEISKSLISLNTTLLDLQLNIENLNGKIQENTFKQQEEISKLEERVYNVSAEIMAMKEEQVHLEQEIKGEVKVLNNITNDLRLKDWEHSQTLRNITLIQGPPGPPGEKGDRGPTGESGPRGFPGPIGPPGLKGDRGAIGFPGSRGLPGYAGRPGNSGPKGQKGEKGSGNTLTPFTKVRLVGGSGPHEGRVEILHSGQWGTICDDRWEVRVGQVVCRSLGYPGVQAVHKAAHFGQGTGPIWLNEVFCFGRESSIEECKIRQWGTRACSHSEDAGVTCTL

SEQ ID NO: 544 - protein, 753 aa, Homo sapiens
MGEHSPDNNIIYFEAEEDELTPDDKMLRFVDKNGLVPSSSGTVYDRTTVLIEQDPGTLEDEDDDGQCGEHLPFLVGGEEGFHLIDHEAMSQGYVQHIISPDQIHLTINPGSTPMPRNIEGATLTLQSECPETKRKEVKRYQCTFEGCPRTYSTAGNLRTHQKTHRGEYTFVCNQEGCGKAFLTSYSLRIHVRVHTKEKPFECDVQGCEKAFNTLYRLKAHQRLHTGKTFNCESEGCSKYFTTLSDLRKHIRTHTGEKPFRCDHDGCGKAFAASHHLKTHVRTHTGERPFFCPSNGCEKTFSTQYSLKSHMKGHDNKGHSYNALPQHNGSEDTNHSLCLSDLSLLSTDSELRENSSTTQGQDLSTISPAIIFESMFQNSDDTAIQEDPQQTASLTESFNGDAESVSDVPPSTGNSASLSLPLVLQPGLSEPPQPLLPASAPSAPPPAPSLGPGSQQAAFGNPPALLQPPEVPVPHSTQFAANHQEFLPHPQAPQPIVPGLSVVAGASASAAAVASAVAAPAPPQSTTEPLPAMVQTLPLGANSVLTNNPTITITPTPNTAILQSSLVMGEQNLQWILNGATSSPQNQEQIQQASKVEKVFFTTAVPVASSPGSSVQQIGLSVPVIIIKQEEACQCQCACRDSAKERASSRRKGCSSPPPPEPSPQAPDGPSLQLPAQTFSSAPVPGSSSSTLPSSCEQSRQAETPSDPQTETLSAMDVSEFLSLQSLDTPSNLIPIEALLQGEEEMGLTSSFSK

SEQ ID NO: 545 - protein, 656 aa, Homo sapiens [sequence omitted]

SEQ ID NO: 546 - protein, 2549 aa, Homo sapiens
MLGTGPAAATTAATTSSNVSVLQQFASGLKSRNEETRAKAAKELQHYVTMELREMSQEESTRFYDQLNHHIFELVSSSDANERKGGILAIASLIGVEGGNATRIGRFANYLRNLLPSNDPVVMEMASKAIGRLAMAGDTFTAEYVEFEVKRALEWLGADRNEGRRHAAVLVLRELAISVPTFFFQQVQPFFDNIFVAVWDPKQAIREGAVAALRACLILTTQREPKEMQKPQWYRHTFEEAEKGFDETLAKEKGMNRDDRIHGALLILNELVRISSMEGERLREEMEEITQQQLVHDKYCKDLMGFGTKPRHITPFTSFQAVQPQQSNALVGLLGYSSHQGLMGFGTSPSPAKSTLVESRCCRDLMEEKFDQVCQWVLKCRNSKNSLIQMTILNLLPRLAAFRPSAFTDTQYLQDTMNHVLSCVKKEKERTAAFQALGLLSVAVRSEFKVYLPRVLDIIRAALPPKDFAHKRQKAMQVDATVFTCISMLARAMGPGIQQDIKELLEPMLAVGLSPALTAVLYDLSRQIPQLKKDIQDGLLKMLSLVLMHKPLRHPGMPKGLAHQLASPGLTTLPEASDVGSITLALRTLGSFEFEGHSLTQFVRHCADHFLNSEHKEIRMEAARTCSRLLTPSIHLISGHAHVVSQTAVQVVADVLSKLLVVGITDPDPDIRYCVLASLDERFDAHLAQAENLQALFVALNDQVFEIRELAICTVGRLSSMNPAFVMPFLRKMLIQILTELEHSGIGRIKEQSARMLGHLVSNAPRLIRPYMEPILKALILKLKDPDPDPNPGVINNVLATIGELAQVSGLEMRKWVDELFIIIMDMLQDSSLLAKRQVALWTLGQLVASTGYVVEPYRKYPTLLEVLLNFLKTEQNQGTRREAIRVLGLLGALDPYKHKVNIGMIDQSRDASAVSLSESKSSQDSSDYSTSEMLVNMGNLPLDEFYPAVSMVALMRIFRDQSLSHHHTMVVQAITFIFKSLGLKCVQFLPQVMPTFLNVIRVCDGAIREFLFQQLGMLVSFVKSHIRPYMDEIVTLMREFWVMNTSIQSTIILLIEQIVVALGGEFKLYLPQLIPHMLRVFMHDNSPGRIVSIKLLAAIQLFGANLDDYLHLLLPPIVKLFDAPEAPLPSRKAALETVDRLTESLDFTDYASRIIHPIVRTLDQSPELRSTAMDTLSSLVFQLGKKYQIFIPMVNKVLVRHRINHQRYDVLICRIVKGYTLADEEEDPLIYQHRMLRSGQGDALASGPVETGPMKKLHVSTINLQKAWGAARRVSKDDWLEWLRRLSLELLKDSSSPSLRSCWALAQAYNPMARDLFNAAFVSCWSELNEDQQDELIRSIELALTSQDIAEVTQTLLNLAEFMEHSDKGPLPLRDDNGIVLLGERAAKCRAYAKALHYKELEFQKGPTPAILESLISINNKLQQPEAAAGVLEYAMKHFGELEIQATWYEKLHEWEDALVAYDKKMDTNKDDPELMLGRMRCLEALGEWGQLHQQCCEKWTLVNDETQAKMARMAAAAAWGLGQWDSMEEYTCMIPRDTHDGAFYRAVLALHQDLFSLAQQCIDKARDLLDAELTAMAGESYSRAYGAMVSCHMLSELEEVIQYKLVPERREIIRQIWWERLQGCQRIVEDWQKILMVRSLVVSPHEDMRTWLKYASLCGKSGRLALAHKTLVLLLGVDPSRQLDHPLPTVHPQVTYAYMKNMWKSARKIDAFQHMQHFVQTMQQQAQHAIATEDQQHKQELHKLMARCFLKLGEWQLNLQGINESTIPKVLQYYSAATEHDRSWYKAWHAWAVMNFEAVLHYKHQNQARDEKKKLRHASGANITNATTAATTAATATTTASTEGSNSESEAESTENSPTPSPLQKKVTEDLSKTLLMYTVPAVQGFFRSISLSRGNNLQDTLRVLTLWFDYGHWPDVNEALVEGVKAIQIDTWLQVIPQLIARIDTPRPLVGRLIHQLLTDIGRYHPQALIYPLTVASKSTTTARHNAANKILKNMCEHSNTLVQQAMMVSEELIRVAILWHEMWHEGLEEASRLYFGERNVKGMFEVLEPLHAMMERGPQTLKETSFNQAYGRDLMEAQEWCRKYMKSGNVKDLTQAWDLYYHVFRRISKQLPQLTSLELQYVSPKLLMCRDLELAVPGTYDPNQPIIRIQSIAPSLQVITSKQRPRKLTLMGSNGHEFVFLLKGHEDLRQDERVMQLFGLVNTLLANDPTSLRKNLSIQRYAVIPLSTNSGLIGWVPHCDTLHALIRDYREKKKILLNIEHRIMLRMAPDYDHLTLMQKVEVFEHAVNNTAGDDLAKLLWLKSPSSEVWFDRRTNYTRSLAVMSMVGYILGLGDRHPSNLMLDRLSGKILHIDFGDCFEVAMTREKFPEKIPFRLTRMLTNAMEVTGLDGNYRITCHTVMEVLREHKDSVMAVLEAFVYDPLLNWRLMDTNTKGNKRSRTRTDSYSAGQSVEILDGVELGEPAHKKTGTTVPESIHSFIGDGLVKPEALNKKAIQIINRVRDKLTGRDFSHDDTLDVPTQVELLIKQATSHENLCQCYIGWCPFW

SEQ ID NO: 547 - protein, 1265 aa, Homo sapiens
MSPALQDLSQPEGLKKTLRDEINAILQKRIMVLDGGMGTMIQREKLNEEHFRGQEFKDHARPLKGNNDILSITQPDVIYQIHKEYLLAGADIIETNTFSSTSIAQADYGLEHLAYRMNMCSAGVARKAAEEVTLQTGIKRFVAGALGPTNKTLSVSPSVERPDYRNITFDELVEAYQEQAKGLLDGGVDILLIETIFDTANAKAALFALQNLFEEKYAPRPIFISGTIVDKSGRTLSGQTGEGFVISVSHGEPLCIGLNCALGAAEMRPFIEIIGKCTTAYVLCYPNAGLPNTFGDYDETPSMMAKHLKDFAMDGLVNIVGGCCGSTPDHIREIAEAVKNCKPRVPPATAFEGHMLLSGLEPFRIGPYTNFVNIGERCNVAGSRKFAKLIMAGNYEEALCVAKVQVEMGAQVLDVNMDDGMLDGPSAMTRFCNLIASEPDIAKVPLCIDSSNFAVIEAGLKCCQGKCIVNSISLKEGEDDFLEKARKIKKYGAAMVVMAFDEEGQATETDTKIRVCTRAYHLLVKKLGFNPNDIIFDPNILTIGTGMEEHNLYAINFIHATKVIKETLPGARISGGLSNLSFSFRGMEAIREAMHGVFLYHAIKSGMDMGIVNAGNLPVYDDIHKELLQLCEDLIWNKDPEATEKLLRYAQTQGTGGKKVIQTDEWRNGPVEERLEYALVKGIEKHIIEDTEEARLNQKKYPRPLNIIEGPLMNGMKIVGDLFGAGKMFLPQVIKSARVMKKAVGHLIPFMEKEREETRVLNGTVEEEDPYQGTIVLATVKGDVHDIGKNIVGVVLGCNNFRVIDLGVMTPCDKILKAALDHKADIIGLSGLITPSLDEMIFVAKEMERLAIRIPLLIGGATTSKTHTAVKIAPRYSAPVIHVLDASKSVVVCSQLLDENLKDEYFEEIMEEYEDIRQDHYESLKERRYLPLSQARKSGFQMDWLSEPHPVKPTFIGTQVFEDYDLQKLVDYIDWKPFFDVWQLRGKYPNRGFPKIFNDKTVGGEARKVYDDAHNMLNTLISQKKLRARGVVGFWPAQSIQDDIHLYAEAAVPQAAEPIATFYGLRQQAEKDSASTEPYYCLSDFIAPLHSGIRDYLGLFAVACFGVEELSKAYEDDGDDYSSIMVKALGDRLAEAFAEELHERVRRELWAYCGSEQLDVADLRRLRYKGIRPAPGYPSQPDHTEKLTMWRLADIEQSTGIRLTESLAMAPASAVSGLYFSNLKSKYFAVGKISKDQVEDYALRKNISVAEVEKWLGPILGYDTD

SEQ ID NO: 548 - protein, 263 aa, Homo sapiens
MSLVAEAFVSQIAAAEPWPENATLYQQLKGEQILLSDNAASLAVQAFLQMCNLPIKVVCRANAEYMSPSGKVPFIHVGNQVVSELGPIVQFVKAKGHSLSDGLEEVQKAEMKAYMELVNNMLLTAELYLQWCDEATVGEITHARYGSPYPWPLNHILAYQKQWEVKRKMKAIGWGKKTLDQVLEDVDQCCQALSQRLGTQPYFFNKQPTELDALVFGHLYTILTTQLTNDELSEKVKNYSNLLAFCRRIEQHYFEDRGKGRLS

SEQ ID NO: 549 - protein, 1939 aa, Homo sapiens
MSSDSEMAIFGEAAPFLRKSEKERIEAQNKPFDAKTSVFVVDPKESYVKAIVQSREGGKVTAKTEAGATVTVKEDQVFSMNPPKYDKIEDMAMMTHLHEPAVLYNLKERYAAWMIYTYSGLFCVTVNPYKWLPVYNPEVVTAYRGKKRQEAPPHIFSISDNAYQFMLTDRENQSILITGESGAGKTVNTKRVIQYFATIAVTGEKKKEEPASGKMQGTLEDQIISANPLLEAFGNAKTVRNDNSSRFGKFIRIHFGATGKLASADIETYLLEKSRVTFQLKAERSYHIFYQILSNKKPELIEMLLITTNPYDFAFVSQGEITVPSIDDQEELMATDSAVDILGFTADEKVAIYKLTGAVMHYGNMKFKQKQREEQAEPDGTEVADKAAYLTSLNSADLLKSLCYPRVKVGNEFVTKGQTVQQVYNAVGALAKAIYEKMFLWMVTRINQQLDTKQPRQYFIGVLDIAGFEIFDFNSLEQLCINFTNEKLQQFFNHHMFVLEQEEYKKEGIEWEFIDFGMDLAACIELIEKPMGIFSILEEECMFPKATDTSFKNKLYEQHLGKSNNFQKPKPAKGKPEAHFSLVHYAGTVDYNIAGWLDKNKDPLNETVVGLYQKSAMKTLAFLFSGAQTAEAEGGGGKKGGKKKGSSFQTVSALFRENLNKLMTNLRSTHPHFVRCIIPNETKTPGAMEHELVLHQLRCNGVLEGIRICRKGFPSRILYADFKQRYKVLNASAIPEGQFIDSKKASEKLLGSIEIDHTQYKFGHTKVFFKAGLLGTLEEMRDEKLAQLITRTQAICRGFLMRVEFRKMMERRESIFCIQYNIRAFMNVKHWPWMKLYFKIKPLLKSAETEKEMANMKEEFEKTKEELAKTEAKRKELEEKMVTLMQEKNDLQLQVQAEADALADAEERCDQLIKTKIQLEAKIKEVTERAEDEEEINAELTAKKRKLEDECSELKKDIDDLELTLAKVEKEKHATENKVKNLTEEMAGLDETIAKLTKEKKALQEAHQQTLDDLQMEEDKVNTLTKAKTKLEQQVDDLEGSLEQEKKLCMDLERAKRKLEGDLKLAQESTMDTENDKQQLNEKLKKKEFEMSNLQGKIEDEQALAIQLQKKIKELQARIEELEEEIEAERASRAKAEKQRSDLSRELEEISERLEEAGGATSAQIEMNKKREAEFQKMRRDLEESTLQHEATAAALRKKHADSVAELGEQIDSLQRVKQKLEKEKSELKMEINDLASNMETVSKAKANFEKMCRTLEDQLSEIKTKEEEQQRLINELSAQKARLHTESGEFSRQLDEKDAMVSQLSRGKQAFTQQIEELKRQLEEETKAKSTLAHALQSARHDCDLLREQYEEEQEAKAELQRGMSKANSEVAQWRTKYETDAIQRTEELEEAKKKLAQRLQDAEEHVEAVNSKCASLEKTKQRLQNEVEDLMIDVERSNAACIALDKKQRNFDKVLAEWKQKYEETQAELEASQKESRSLSTELFKVKNAYEESLDHLETLKRENKNLQQEISDLTEQIAEGGKHIHELEKVKKQLDHEKSELQTSLEEAEASLEHEEGKILRIQLELNQVKSEIDRKIAEKDEELDQLKRNHLRVVESMQSTLDAEIRSRNDALRIKKKMEGDLNEMEIQLNHANRQAAEALRNLRNTQGILKDTQLHLDDAIRGQDDLKEQLAMVERRANLMQAEVEELRASLERTERGRKMAEQELLDASERVQLLHTQNTSLINTKKKLETDISQIQGEMEDIVQEARNAEEKAKKAITDAAMMAEELKKEQDTSAHLERMKKNMEQTVKDLQLRLDEAEQLALKGGKKQIQKLEARVRELESEVESEQKHNVEAVKGLRKHERRVKELTYQTEEDRKNILRLQDLVDKLQTKVKAYKRQAEEAEEQSNVNLAKFRKLQHELEEAKERADIAESQVNKLRVKSREVHTKVISEE

SEQ ID NO: 550 - protein, 1880 aa, Homo sapiens
MSHYHFIKCCCFQLCNVFRSHEMEIDQCLLESLPLGQRQRLVKRMRCEQIKAYYEREKAFQKQEGFLKRLKHAKNPKVHFNLTDMLQDAIIHHNDKEVLRLLKEGADPHTLVSSGGSLLHLCARYDNAFIAEILIDRGVNVNHQDEDFWTPMHIACACDNPDIVLLLVLAGANVLLQDVNGNIPLDYAVEGTESSSILLTYLDENGVDLTSLRQMKLQRPMSMLTDVKHFLSSGGNVNEKNDEGVTLLHMACASGYKEVVSLILEHGGDLNIVDDQYWTPLHLAAKYGQTNLVKLLLMHQANPHLVNCNEEKASDIAASEFIEEMLLKAEIAWEEKMKEPLSASTLAQEEPYEEIIHDLPVLSSKLSPLVLPIAKQDSLLEKDIMFKDATKGLCKQQSQDSIPENPMMSGSTKPEQVKLMPPAPNDDLATLSELNDGSLLYEIQKRFGNNQIYTFIGDILLLVNPYKELPIYSSMVSQLYFSSSGKLCSSLPPHLFSCVERAFHQLFREQRPQCFILSGERGSGKSEASKQIIRHLTCRAGASRATLDSRFKHVVCILEAFGHAKTTLNDLSSCFIKYFELQFCERKQQLTGARIYTYLLEKSRLVSQPLGQSNFLIFYLLMDGLSAEEKYGLHLNNLCAHRYLNQTIQDDASTGERSLNREKLAVLKRALNVVGFSSLEVENLFVILAAILHLGDIRFTALNEGNSAFVSDLQLLEQVAGMLQVSTDELASALTTDIQYFKGDMIIRRHTIQIAEFFRDLLAKSLYSRLFSFLVNTMNSCLHSQDEQKSMQTLDIGILDIFGFEEFQKNEFEQLCVNMTNEKMHHYINEVLFLHEQVECVQEGVTMETAYSPGNQNGVLDFFFQKPSGFLTLLDEESQMIWSVESNFPKKLQSLLESSNTNAVYSPMKDGNGNVALKDHGTAFTIMHYAGRVMYDVVGAIEKNKDSLSQNLLFVMKTSENVVINHLFQSKLSQTGSLVSAYPSFKFRGHKSALLSKKMTASSIIGENKNYLELSKLLKKKGTSTFLQRLERGDPVTIASQLRKSLMDIIGKLQKCTPHFIHCIRPNNSKLPDTFDNFYVSAQLQYIGVLEMVKIFRYGYPVRLSFSDFLSRYKPLADTFLREKKEQSAAERCRLVLQQCKLQGWQMGVRKVFLKYWHADQLNDLCLQLQRKIITCQKVIRGFLARQHLLQRISIRQQEVTSINSFLQNTEDMGLKTYDALVIQNASDIARENDRLRSEMNAPYHKEKLEVRNMQEEGSKRTDDKSGPRHFHPSSMSVCAAVDGLGQCLVGPSIWSPSLHSVFSMDDSSSLPSPRKQPPPKPKRDPNTRLSASYEAVSACLSAAREAANEALARPRPHSDDYSTMKKIPPRKPKRSPNTKLSGSYEEISGSRPGDARPAGAPGAAARVLTPGTPQCALPPAAPPGDEDDSEPVYIEMLGHAARPDSPDPGESVYEEMKCCLPDDGGPGAGSFLLHGASPPLLHRAPEDEAAGPPGDACDIPPPFPNLLPHRPPLLVFPPTPVTCSPASDESPLTPLEVKKLPVLETNLKYPVQPEGSSPLSPQYSKSQKGDGDRPASPGLALFNGSGRASPPSTPPPPPPPPGPPPAPYRPCAHLAFPPEPAPVNAGKAGPSAEAPKVHPKPNSAPVAGPCSSFPKIPYSPVKATRADARKAGSSASPPAPYSPPSSRPLSSPLDELASLFNSGRSVLRKSAAGRKIREAEGFETNMNISSRDDPSTSEITSETQDRNANNHGIQLSNSLSSAITAENGNSISNGLPEEDGYSRLSISGTGTSTFQRHRDSHTTQVIHQLRLSENESVALQELLDWRRKLCEEGQDWQQILHHAEPRVPPPPPCKKPSLLKKPEGASCNRLPSELWDTTI

SEQ ID NO: 551 - skipped

SEQ ID NO: 552 - protein, 1043 aa, Homo sapiens
MPLLEGSVGVEDLVLLEPLVEESLLKNLQLRYENKEIYTYIGNVVISVNPYQQLPIYGPEFIAKYQDYTFYELKPHIYALANVAYQSLRDRDRDQCILITGESGSGKTEASKLVMSYVAAVCGKGEQVNSVKEQLLQSNPVLEAFGNAKTIRNNNSSRFGKYMDIEFDFKGSPLGGVITNYLLEKSRLVKQLKGERNFHIFYQLLAGADEQLLKALKLERDTTGYAYLNHEVSRVDGMDDASSFRAVQSAMAVIGFSEEEIRQVLEVTSMVLKLGNVLVADEFQASGIPASGIRDGRGVREIGEMVGLNSEEVERALCSRTMETAKEKVVTALNVMQAQYARDALAKNIYSRLFDWIVNRINESIKVGIGEKKKVMGVLDIYGFEILEDNSFEQFVINYCNEKLQQVFIEMTLKEEQEEYKREGIPWTKVDYFDNGIICKLIEHNQRGILAMLDEECLRPGVVSDSTFLAKLNQLFSKHGHYESKVTQNAQRQYDHTMGLSCFRICHYAGKVTYNVTSFIDKNNDLLFRDLLQAMWKAQHPLLRSLFPEGNPKQASLKRPPTAGAQFKSSVAILMKNLYSKSPNYIRCIKPNEHQQRGQFSSDLVATQARYLGLLENVRVRRAGYAHRQGYGPFLERYRLLSRSTWPHWNGGDREGVEKVLGELSMSSGELAFGKTKIFIRSPKTLFYLEEQRRLRLQQLATLIQKIYRGWRCRTHYQLMRKSQILISSWFRGNMQKKCYGKIKASVLLIQAFVRGWKARKNYRKYFRSEAALTLADFIYKSMVQKFLLGLKNNLPSTNVLDKTWPAAPYKCLSTANQELQQLFYQWKCKRFRDQLSPKQVEILREKLCASELFKGKKASYPQSVPIPFCGDYIGLQGNPKLQKLKGGEEGPVLMAEAVKKVNRGNGKTSSRILLLTKGHVILTDTKKSQAKIVIGLDNVAGVSVTSLKDGLFSLHLSEMSSVGSKGDFLLVSEHVIELLTKMYRAVLDATQRQLTVTVTEKFSVRFKENSVAVKVVQGPAGGDNSKLRYKKKGSHCLEVTVQ

SEQ ID NO: 553 - protein, 2157 aa, Homo sapiens
MSVKEAGSSGRREQAAYHLHIYPQLSTTESQASCRVTATKDSTTSDVIKDAIASLRLDGTKCYVLVEVKESGGEEWVLDANDSPVHRVLLWPRRAQDEHPQEDGYYFLLQERNADGTIKYVHMQLVAQATATRRLVERGLLPRQQADFDDLCNLPELTEGNLLKNLKHRFLQQKIYTYAGSILVAINPFKFLPIYNPKYVKMYENQQLGKLEPHVFALADVAYYTMLRKRVNQCIVISGESGSGKTQSTNFLIHCLTALSQKGYASGVERTILGAGPVLEAFGNAKTAHNNNSSRFGKFIQVSYLESGIVRGAVVEKYLLEKSRLVSQEKDERNYHVFYYLLLGVSEEERQEFQLKQPEDYFYLNQHNLKIEDGEDLKHDFERLKQAMEMVGFLPATKKQIFAVLSAILYLGNVTYKKRATGREEGLEVGPPEVLDTLSQLLKVKREILVEVLTKRKTVTVNDKLILPYSLSEAITARDSMAKSLYSALFDWIVLRINHALLNKKDVEEAVSCLSIGVLDIFGFEDFERNSFEQFCINYANEQLQYYFNQHIFKLEQEEYQGEGITWHNIGYTDNVGCIHLISKKPTGLFYLLDEESNFPHATSQTLLAKFKQQHEDNKYFLGTPVMEPAFIIQHFAGKVKYQIKDFREKNMDYMRPDIVALLRGSDSSYVRELIGMDPVAVFRWAVLRAAIRAMAVLREAGRLRAERAEKAAGMSSPGAQSHPEELPRGASTPSEKLYRDLHNQMIKSIKGLPWQGEDPRSLLQSLSRLQKPRAFILKSKGIKQKQIIPKNLLDSKSLKLIISMTLHDRTTKSLLHLHKKKKPPSISAQFQTSLNKLLEALGKAEPFFIRCIRSNAEKKELCFDDELVLQQLRYTGMLETVRIRRSGYSAKYTFQDFTEQFQVLLPKDAQPCREVISTLLEKMKIDKRNYQIGKTKVFLKETERQALQETLHREVVRKILLLQSWFRMVLERRHFLQMKRAAVTIQACWRSYRVRRALERTQAAVYLQASWRGYWQRKLYRHQKQSIIRLQSLCRGHLQRKSFSQMISEKQKAEEKEREALEAARAGAEEGGQGQAAGGQQVAEQGPEPAEDGGHLASEPEVQPSDRSPLEHSSPEKEAPSPEKTLPPQKTVAAESHEKVPSSREKRESRRQRGLEHVKFQNKHIQSCKEESALREPSRRVTQEQGVSLLEDKKESREDETLLVVETEAENTSQKQPTEQPQAMAVGKVSEETEKTLPSGSPRPGQLERPTSLALDSRVSPPAPGSAPETPEDKSKPCGSPRVQEKPDSPGGSTQIQRYLDAERLASAVELWRGKKLVAAASPSAMLSQSLDLSDRHRATGAALTPTEERRTSFSTSDVSKLLPSLAKAQPAAETTDGERSAKKPAVQKKKPGDASSLPDAGLSPGSQVDSKSTFKRLFLHKTKDKKYSLEGAEELENAVSGHVVLEATTMKKGLEAPSGQQHRHAAGEKRTKEPGGKGKKNRNVKIGKITVSEKWRESVFRQITNANELKYLDEFLLNKINDLRSQKTPIESLFIEATEKFRSNIKTMYSVPNGKIHVGYKDLMENYQIVVSNLATERGQKDTNLVLNLFQSLLDEFTRGYTKNDFEPVKQSKAQKKKRKQERAVQEHNGHVFASYQVSIPQSCEQCLSYIWLMDKALLCSVCKMTCHKKCVHKIQSHCSYTYGRKGEPGVEPGHFGVCVDSLTSDKASVPIVLEKLLEHVEMHGLYTEGLYRKSGAANRTRELRQALQTDPAAVKLENFPIHAITGVLKQWLRELPEPLMTFAQYGDFLRAVELPEKQEQLAAIYAVLEHLPEANHNSLERLIFHLVKVALLEDVNRMSPGALAIIFAPCLLRCPDNSDPLTSMKDVLKITTCVEMLIKEQMRKYKVKMEEISQLEAAESIAFRRLSLLRQNAPWPLKLGFSSPYEGVLNKSPKTRDIQEEELEVLLEEEAAGGDEDREKEILIERIQSIKEEKEDITYRLPELDPRGSDEENLDSETSASTESLLEERAGRGASEGPPAPALPCPGAPTPSPLPTVAAPPRRRPSSFVTVRVKTPRRTPIMPTANIKLPPGLPSHLPRWAPGAREAAAPVRRREPPARRPDQIHSVYITPGADLPVQGALEPLEEDGQPPGAKRRYSDPPTYCLPPASGQTNG

SEQ ID NO: 554 - protein, 299 aa, Homo sapiens
MPLSGTPAPNKKRKSSKLIMELTGGGQESSGLNLGKKISVPRDVMLEELSLLTNRGSKMFKLRQMRVEKFIYENHPDVFSDSSMDHFQKFLPTVGGQLGTAGQGFSYSKSNGRGGSQAGGSGSAGQYGSDQQHHLGSGSGAGGTGGPAGQAGRGGAAGTAGVGETGSGDQAGGEGKHITVFKTYISPWERAMGVDPQQKMELGIDLLAYGAKAELPKYKSFNRTAMPYGGYEKASKRMTFQMPKFDLGPLLSEPLVLYNQNLSNRPSFNRTPIPWLSSGEPVDYNVDIGIPLDGETEEL

SEQ ID NO: 555 - protein, 1184 aa, Homo sapiens
MEVDTEEKRHRTRSKGVRVPVEPAIQELFSCPTPGCDGSGHVSGKYARHRSVYGCPLAKKRKTQDKQPQEPAPKRKPFAVKADSSSVDECDDSDGTEDMDEKEEDEGEEYSEDNDEPGDEDEEDEEGDREEEEEIEEEDEDDDEDGEDVEDEEEEEEEEEEEEEEEENEDHQMNCHNTRIMQDTEKDDNNNDEYDNYDELVAKSLLNLGKIAEDAAYRARTESEMNSNTSNSLEDDSDKNENLGRKSELSLDLDSDVVRETVDSLKLLAQGHGVVLSENMNDRNYADSMSQQDSRNMNYVMLGKPMNNGLMEKMVEESDEEVCLSSLECLRNQCFDLARKLSETNPQERNPQQNMNIRQHVRPEEDFPGRTPDRNYSDMLNLMRLEEQLSPRSRVFASCAKEDGCHERDDDTTSVNSDRSEEVFDMTKGNLTLLEKAIALETERAKAMREKMAMEAGRRDNMRSYEDQSPRQLPGEDRKPKSSDSHVKKPYYDPSRTEKKESKCPTPGCDGTGHVTGLYPHHRSLSGCPHKDRVPPEILAMHESVLKCPTPGCTGRGHVNSNRNSHRSLSGCPIAAAEKLAKAQEKHQSCDVSKSSQASDRVLRPMCFVKQLEIPQYGYRNNVPTTTPRSNLAKELEKYSKTSFEYNSYDNHTYGKRAIAPKVQTRDISPKGYDDAKRYCKDPSPSSSSTSSYAPSSSSNLSCGGGSSASSTCSKSSFDYTHDMEAAHMAATAILNLSTRCREMPQNLSTKPQDLCATRNPDMEVDENGTLDLSMNKQRPRDSCCPILTPLEPMSPQQQAVMNNRCFQLGEGDCWDLPVDYTKMKPRRIDEDESKDITPEDLDPFQEALEERRYPGEVTIPSPKPKYPQCKESKKDLITLSGCPLADKSIRSMLATSSQELKCPTPGCDGSGHITGNYASHRSLSGCPRAKKSGIRIAQSKEDKEDQEPIRCPVPGCDGQGHITGKYASHRSASGCPLAAKRQKDGYLNGSQFSWKSVKTEGMSCPTPGCDGSGHVSGSFLTHRSLSGCPRATSAMKKAKLSGEQMLTIKQRASNGIENDEEIKQLDEEIKELNESNSQMEADMIKLRTQITTMESNLKTIEEENKVIEQQNESLLHELANLSQSLIHSLANIQLPHMDPINEQNFDAYVTTLTEMYTNQDRYQSPENKALLENIKQAVRGIQV

SEQ ID NO: 556 - protein, 866 aa, Homo sapiens
MPAVSLPPKENALFKRILRCYEHKQYRNGLKFCKQILSNPKFAEHGETLAMKGLTLNCLGKKEEAYELVRRGLRNDLKSHVCWHVYGLLQRSDKKYDEAIKCYRNALKWDKDNLQILRDLSLLQIQMRDLEGYRETRYQLLQLRPAQRASWIGYAIAYHLLEDYEMAAKILEEFRKTQQTSPDKVDYEYSELLLYQNQVLREAGLYREALEHLCTYEKQICDKLAVEETKGELLLQLCRLEDAADVYRGLQERNPENWAYYKGLEKALKPANMLERLKIYEEAWTKYPRGLVPRRLPLNFLSGEKFKECLDKFLRMNFSKGCPPVFNTLRSLYKDKEKVAIIEELVVGYETSLKSCRLFNPNDDGKEEPPTTLLWVQYYLAQHYDKIGQPSIALEYINTAIESTPTLIELFLVKAKIYKHAGNIKEAARWMDEAQALDTADRFINSKCAKYMLKANLIKEAEEMCSKFTREGTSAVENLNEMQCMWFQTECAQAYKAMNKFGEALKKCHEIERHFIEITDDQFDFHTYCMRKITLRSYVDLLKLEDVLRQHPFYFKAARIAIEIYLKLHDNPLTDENKEHEADTANMSDKELKKLRNKQRRAQKKAQIEEEKKNAEKEKQQRNQKKKKDDDDEEIGGPKEELIPEKLAKVETPLEEAIKFLTPLKNLVKNKIETHLFAFEIYFRKEKFLLMLQSVKRAFAIDSSHPWLHECMIRLFNTAVCESKDLSDTVRTVLKQEMNRLFGATNPKNFNETFLKRNSDSLPHRLSAAKMVYYLDPSSQKRAIELATTLDESLTNRNLQTCMEVLEALYDGSLGDCKEAAEIYRANCHKLFPYALAFMPPGYEEDMKITVNGDSSAEAEELANEI

SEQ ID NO: 557 - protein, 795 aa, Homo sapiens
MGENEASLPNTSLQGKKMAYQKVHADQRAPGHSQYLDNDDLQATALDLEWDMEKELEESGFDQFQLDGAENQNLGHSETIDLNLDSIQPATSPKGRFQRLQEESDYITHYTRSAPKSNRCNFCHVLKILCTATILFIFGILIGYYVHTNCPSDAPSSGTVDPQLYQEILKTIQAEDIKKSFRNLVQLYKNEDDMEISKKIKTQWTSLGLEDVQFVNYSVLLDLPGPSPSTVTLSSSGQCFHPNGQPCSEEARKDSSQDLLYSYAAYSAKGTLKAEVIDVSYGMADDLKRIRKIKNVTNQIALLKLGKLPLLYKLSSLEKAGFGGVLLYIDPCDLPKTVNPSHDTFMVSLNPGGDPSTPGYPSVDESFRQSRSNLTSLLVQPISAPLVAKLISSPKARTKNEACSSLELPNNEIRVVSMQVQTVTKLKTVTNVVGFVMGLTSPDRYIIVGSHHHTAHSYNGQEWASSTAIITAFIRALMSKVKRGWRPDRTIVFCSWGGTAFGNIGSYEWGEDFKKVLQKNVVAYISLHSPIRGNSSLYPVASPSLQQLVVEKNNFNCTRRAQCPETNISSIQIQGDADYFINHLGVPIVQFAYEDIKTLEGPSFLSEARFSTRATKIEEMDPSFNLHETITKLSGEVILQIANEPVLPFNALDIALEVQNNLKGDQPNTHQLLAMALRLRESAELFQSDEMRPANDPKERAPIRIRMLNDILQDMEKSFLVKQAPPGFYRNILYHLDEKTSRFSILIEAWEHCKPLASNETLQEALSEVLNSINSAQVYFKAGLDVFKSVLDGKN

SEQ ID NO: 558 - protein, 527 aa, Homo sapiens
MAQTLQMEIPNFGNSILECLNEQRLQGLYCDVSVVVKGHAFKAHRAVLAASSSYFRDLFNNSRSAVVELPAAVQPQSFQQILSFCYTGRLSMNVGDQFLLMYTAGFLQIQEIMEKGTEFFLKVSSPSCDSQGLHAEEAPSSEPQSPVAQTSGWPACSTPLPLVSRVKTEQQESDSVQCMPVAKRLWDSGQKEAGGGGNGSRKMAKFSTPDLAANRPHQPPPPQQAPVVAAAQPAVAAGAGQPAGGVAAAGGVVSGPSTSERTSPGTSSAYTSDSPGSYHNEEDEEEDGGEEGMDEQYRQICNMYTMYSMMNVGQTAEKVEALPEQVAPESRNRIRVRQDLASLPAELINQIGNRCHPKLYDEGDPSEKLELVTGTNVYITRAQLMNCHVSAGTRHKVLLRRLLASFFDRNTLANSCGTGIRSSTNDPRRKPLDSRVLHAVKYYCQNFAPNFKESEMNAIAADMCTNARRVVRKSWMPKVKVLKAEDDAYTTFISETGKIEPDMMGVEHGFETASHEGEAGPSAEALQ

SEQ ID NO: 559 - protein, 2488 aa, Homo sapiens
MPAILVASKMKSGLPKPVHSAAPILHVPPARAGPQPCYLKLGSKVEVSKTTYPSQIPLKSQVLQGLQEPAGEGLPLRKSGSVENGFDTQIYTDWANHYLAKSGHKRLIRDLQQDVTDGVLLAQIIQVVANEKIEDINGCPKNRSQMIENIDACLNFLAAKGINIQGLSAEEIRNGNLKAILGLFFSLSRYKQQQQQPQKQHLSSPLPPAVSQVAGAPSQCQAGTPQQQVPVTPQAPCQPHQPAPHQQSKAQAEMQSSASSKDSSQSKIIRFTLGQKKISRLPGPTARVSAAGSEAKTRGGSTTANNRRSQSFNNYDKSKPVTSPPPPPSSHEKEPLASSASSHPGMSDNAPASLESGSSSTPTNCSTSSAIPQPGAATKPWRSKSLSVKHSATVSMLSVKPPGPEAPRPTPEAMKPAPNNQKSMLEKLKLFNSKGGSKAGEGPGSRDTSCERLETLPSFEESEELEAASRMLTTVGPASSSPKIALKGIAQRTFSRALTNKKSSLKGNEKEKEKQQREKDKEKSKDLAKRASVTERLDLKEEPKEDPSGAAVPEMPKKSSKIASFIPKGGKLNSAKKEPMAPSHSGIPKPGMKSMPGKSPSAPAPSKEGERSRSGKLSSGLPQQKPQLDGRHSSSSSSLASSEGKGPGGTTLNHSISSQTVSGSVGTTQTTGSNTVSVQLPQPQQQYNHPNTATVAPFLYRSQTDTEGNVTAESSSTGVSVEPSHFTKTGQPALEELTGEDPEARRLRTVKNIADLRQNLEETMSSLRGTQVTHSTLETTFDTNVTTEMSGRSILSLTGRPTPLSWRLGQSSPRLQAGDAPSMGNGYPPRANASRFINTESGRYVYSAPLRRQLASRGSSVCHVDVSDKAGDEMDLEGISMDAPGYMSDGDVLSKNIRTDDITSGYMTDGGLGLYTRRLNRLPDGMAVVRETLQRNTSLGLGDADSWDDSSSVSSGISDTIDNLSTDDINTSSSISSYANTPASSRKNLDVQTDAEKHSQVERNSLWSGDDVKKSDGGSDSGIKMEPGSKWRRNPSDVSDESDKSTSGKKNPVISQTGSWRRGMTAQVGITMPRTKPSAPAGALKTPGTGKTDDAKVSEKGRLSPKASQVKRSPSDAGRSSGDESKKPLPSSSRTPTANANSFGFKKQSGSAAGLAMITASGVTVTSRSATLGKIPKSSALVSRSAGRKSSMDGAQNQDDGYLALSSRTNLQYRSLPRPSKSNSRNGAGNRSSTSSIDSNISSKSAGLPVPKLREPSKTALGSSLPGLVNQTDKEKGISSDNESVASCNSVKVNPAAQPVSSPAQTSLQPGAKYPDVASPTLRRLFGGKPTKQVPIATAENMKNSVVISNPHATMTQQGNLDSPSGSGVLSSGSSSPLYSKNVDLNQSPLASSPSSAHSAPSNSLTWGTNASSSSAVSKDGLGFQSVSSLHTSCESIDISLSSGGVPSHNSSTGLIASSKDDSLTPFVRTNSVKTTLSESPLSSPAASPKFCRSTLPRKQDSDPHLDRNTLPKKGLRYTPTSQLRTQEDAKEWLRSHSAGGLQDTAANSPFSSGSSVTSPSGTRFNFSQLASPTTVTQMSLSNPTMLRTHSLSNADGQYDPYTDSRFRNSSMSLDEKSRTMSRSGSFRDGFEEESWEKSSVDNFVSRLHSSLHFSLPLFHHARYELVHGSSLSLVSSTSSVYSTPEEKCQSEIRKLRRELDASQEKVSALTTQLTANAHLVAAFEQSLGNMTIRLQSLTMTAEQKDSELNELRKTIELLKKQNAAAQAAINGVINTPELNCKGNGTAQSADLRIRRQHSSDSVSSINSATSHSSVGSNIESDSKKKKRKNWVNELRSSFKQAFGKKKSPKSASSHSDIEEMTDSSLPSSPKLPHNGSTGSTPLLRNSHSNSLISECMDSEAETVMQLRNELRDKEMKLTDIRLEALSSAHQLDQLREAMNRMQSEIEKLKAENDRLKSESQGSGCSRAPSQVSISASPRQSMGLSQHSLNLTESTSLDMLLDDTGECSARKEGGRHVKIVVSFQEEMKWKEDSRPHLFLIGCIGVSGKTKWDVLDGVVRRLFKEYIIHVDPVSQLGLNSDSVLGYSIGEIKRSNTSETPELLPCGYLVGENTTISVTVKGLAENSLDSLVFESLIPKPILQRYVSLLIEHRRIILSGPSGTGKTYLANRLSEYIVLREGRELTDGVIATFNVDHKSSKELRQYLSNLADQCNSENNAVDMPLVIILDNLHHVSSLGEIFNGLLNCKYHKCPYIIGTMNQATSSTPNLQLHHNFRWVLCANHTEPVKGFLGRFLRRKLMETEISGRVRNMELVKIIDWIPKVWHHLNRFLEAHSSSDVTIGPRLFLSCPIDVDGSRVWFTDLWNYSIIPYLLEAVREGLQLYGRRAPWEDPAKWVMDTYPWAASPQQHEWPPLLQLRPEDVGFDGYSMPREGSTSKQMPPSDAEGDPLMNMLMRLQEAANYSSPQSYDSDSNSNSHHDDILDSSLESTL

SEQ ID NO: 560 - protein, 2946 aa, Homo sapiens
MASEKPGPGPGLEPQPVGLIAVGAAGGGGGGSGGGGTGGSGMGELRGASGSGSVMLPAGMINPSVPIRNIRMKFAVLIGLIQVGEVSNRDIVETVLNLLVGGEFDLEMNFIIQDAESITCMTELLEHCDVTCQAEIWSMFTAILRKSVRNLQTSTEVGLIEQVLLKMSAVDDMIADLLVDMLGVLASYSITVKELKLLFSMLRGESGIWPRHAVKLLSVLNQMPQRHGPDTFFNFPGCSAAAIALPPIAKWPYQNGFTLNTWFRMDPLNNINVDKDKPYLYCFRTSKGVGYSAHFVGNCLIVTSLKSKGKGFQHCVKYDFQPRKWYMISIVHIYNRWRNSEIRCYVNGQLVSYGDMAWHVNTNDSYDKCFLGSSETADANRVFCGQLGAVYVFSEALNPAQIFAIHQLGPGYKSTFKFKSESDIHLAEHHKQVLYDGKLASSIAFTYNAKATDAQLCLESSPKENASIFVHSPHALMLQDVKAIVTHSIHSAIHSIGGIQVLFPLFAQLDNRQLNDSQVETTVCATLLAFLVELLKSSVAMQEQMLGGKGFLVIGYLLEKSSRVHITRAVLEQFLSFAKYLDGLSHGAPLLKQLCDHILFNPAIWIHTPAKVQLSLYTYLSAEFIGTATIYTTIRRVGTVLQLMHTLKYYYWVINPADSSGITPKGLDGPRPSQKEIISLRAFMLLFLKQLILKDRGVKEDELQSILNYLLTMHEDENIHDVLQLLVALMSEHPASMIPAFDQRNGIRVIYKLLASKSESIWVQALKVLGYFLKHLGHKRKVEIMHTHSLFTLLGERLMLHTNTVTVTTYNTLYEILTEQVCTQVVHKPHPEPDSTVKIQNPMILKVVATLLKNSTPSAELMEVRRLFLSDMIKLFSNSRENRRCLLQCSVWQDWMFSLGYINPKNSEEQKITEMVYNIFRILLYHAIKYEWGGWRVWVDTLSIAHSKVTYEAHKEYLAKMYEEYQRQEEENIKKGKKGNVSTISGLSSQTTGAKGGMEIREIEDLSQSQSPESETDYPVSTDTRDLLMSTKVSDDILGNSDRPGSGVHVEVHDLLVDIKAEKVEATEVKLDDMDLSPETLVGGENGALVEVESLLDNVYSAAVEKLQNNVHGSVGIIKKNEEKDNGPLITLADEKEDLPNSSTSFLFDKIPKQEEKLLPELSSNHIIPNIQDTQVHLGVSDDLGLLAHMTGSVDLTCTSSIIEEKEFKIHTTSDGMSSISERDLASSTKGLEYAEMTATTLETESSSSKIVPNIDAGSIISDTERSDDGKESGKEIRKIQTTTTTQAVQGRSITQQDRDLRVDLGFRGMPMTEEQRRQFSPGPRTTMFRIPEFKWSPMHQRLLTDLLFALETDVHVWRSHSTKSVMDFVNSNENIIFVHNTIHLISQMVDNIIIACGGILPLLSAATSPTGSKTELENIEVTQGMSAETAVTFLSRLMAMVDVLVFASSLNFSEIEAEKNMSSGGLMRQCLRLVCCVAVRNCLECRQRQRDRGNKSSHGSSKPQEVPQSVTATAASKTPLENVPGNLSPIKDPDRLLQDVDINRLRAVVFRDVDDSKQAQFLALAVVYFISVLMVSKYRDILEPQRETTRTGSQPGRNIRQEINSPTSTVVVIPSIPHPSLNHGFLAKLIPEQSFGHSFYKETPAAFPDTIKEKETPTPGEDIQVESSIPHTDSGIGEEQVASILNGAELETSTGPDAMSELLSTLSSEVKKSQESLTENPSETLKPATSISSISQTKGINVKEILKSLVAAPVEIAECGPEPIPYPDPALKRETQAILPMQFHSFDRSVVVPVKKPPPGSLAVTTVGATTAGSGLPTGSTSNIFAATGATPKSMINTTGAVDSGSSSSSSSSSFVNGATSKNLPAVQTVAPMPEDSAENMSITAKLERALEKVAPLLREIFVDFAPFLSRTLLGSHGQELLIEGLVCMKSSTSVVELVMLLCSQEWQNSIQKNAGLAFIELINEGRLLCHAMKDHIVRVANEAEFILNRQRAEDVHKHAEFESQCAQYAADRREEEKMCDHLISAAKHRDHVTANQLKQKILNILTNKHGAWGAVSHSQLHDFWRLDYWEDDLRRRRRFVRNAFGSTHAEALLKAAIEYGTEEDVVKSKKTFRSQAIVNQNAETELMLEGDDDAVSLLQEKEIDNLAGPVVLSTPAQLIAPVVVAKGTLSITTTEIYFEVDEDDSAFKKIDTKVLAYTEGLHGKWMFSEIRAVFSRRYLLQNTALEVFMANRTSVMFNFPDQATVKKVVYSLPRVGVGTSYGLPQARRISLATPRQLYKSSNMTQRWQRREISNFEYLMFLNTIAGRTYNDLNQYPVFPWVLTNYESEELDLTLPGNFRDLSKPIGALNPKRAVFYAERYETWEDDQSPPYHYNTHYSTATSTLSWLVRIEPFTTFFLNANDGKFDHPDRTFSSVARSWRTSQRDTSDVKELIPEFYYLPEMFVNSNGYNLGVREDEVVVNDVDLPPWAKKPEDFVRINRMALESEFVSCQLHQWIDLIFGYKQRGPEAVRALNVFHYLTYEGSVNLDSITDPVLREAMEAQIQNFGQTPSQLLIEPHPPRSSAMHLCFLPQSPLMFKDQMQQDVIMVLKFPSNSPVTHVAANTLPHLTIPAVVTVTCSRLFAVNRWHNTVGLRGAPGYSLDQAHHLPIEMDPLIANNSGVNKRQITDLVDQSIQINAHCFVVTADNRYILICGFWDKSFRVYSTETGKLTQIVFGHWDVVTCLARSESYIGGDCYIVSGSRDATLLLWYWSGRHHIIGDNPNSSDYPAPRAVLTGHDHEVVCVSVCAELGLVISGAKEGPCLVHTITGDLLRALEGPENCLFPRLISVSSEGHCIIYYERGRFSNFSINGKLLAQMEINDSTRAILLSSDGQNLVTGGDNGVVEVWQACDFKQLYIYPGCDAGIRAMDLSHDQRTLITGMASGSIVAFNIDFNRWHYEHQNRY

SEQ ID NO: 561 - protein, 1134 aa, Homo sapiens
MSRSVLQPSQQKLAEKLTILNDRGVGMLTRLYNIKKQGQVWKACGDPKAKPSYLIDKNLESAVKFIVRKFPAVETRNNNQQLAQLQKEKSEILKNLALYYFTFVDVMEFKDHVCELLNTIDVCQVFFDITVNFDLTKNYLDLIITYTTLMILLSRIEERKAIIGLYNYAHEMTHGASDREYPRLGQMIVDYENPLKKMMEEFVPHSKSLSDALISLQMVYPRRNLSADQWRNAQLLSLISAPSTMLNPAQSDTMPCEYLSLDAMEKWIIFGFILCHGILNTDATALNLWKLALQSSSCLSLFRDEVFHIHKAAEDLFVNIRGYNKRINDIRECKEAAVSHAGSMHRERRKFLRSALKELATVLSDQPGLLGPKALFVFMALSFARDEIIWLLRHADNMPKKSADDFIDKHIAELIFYMEELRAHVRKYGPVMQRYYVQYLSGFDAVVLNELVQNLSVCPEDESIIMSSFVNTMTSLSVKQVEDGEVFDFRGMRLDWFRLQAYTSVSKASLGLADHRELGKMMNTIIFHTKMVDSLVEMLVETSDLSIFCFYSRAFEKMFQQCLELPSQSRYSIAFPLLCTHFMSCTHELCPEERHHIGDRSLSLCNMFLDEMAKQARNLITDICTEQCTLSDQLLPKHCAKTISQAVNKKSKKQTGKKGEPEREKPGVESMRKNRLVVTNLDKLHTALSELCFSINYVPNMVVWEHTFTPREYLTSHLEIRFTKSIVGMTMYNQATQEIAKPSELLTSVRAYMTVLQSIENYVQIDITRVFNNVLLQQTQHLDSHGEPTITSLYTNWYLETLLRQVSNGHIAYFPAMKAFVNLPTENELTFNAEEYSDISEMRSLSELLGPYGMKFLSESLMWHISSQVAELKKLVVENVDVLTQMRTSFDKPDQMAALFKRLSSVDSVLKRMTIIGVILSFRSLAQEALRDVLSYHIPFLVSSIEDFKDHIPRETDMKVAMNVYELSSAAGLPCEIDPALVVALSSQKSENISPEEEYKIACLLMVFVAVSLPTLASNVMSQYSPAIEGHCNNIHCLAKAINQIAAALFTIHKGSIEDRLKEFLALASSSLLKIGQETDKTTTRNRESVYLLLDMIVQESPFLTMDLLESCFPYVLLRNAYHAVYKQSVTSSA

SEQ ID NO: 562 - protein, 1909 aa, Homo sapiens
MEGKRQLEKRDFGKRLSLDSSLVEYMDSNKYIEHLLTQLEEQHRSLWREKLAVARLQREVAQRTSEGAMHEKLIHELEEERHLRLQSEKRLQEVTLESERNRIQMRSLQQQFSRMEETVRNLLQSQGSPEQKKEETVNIMVYQEKLSEEERKHKEALEDLHMVVDEDSRSESSSTDEGKEKTKLLLERLKALEAENSALALENENQREQYERCLDEVANQVVQALLTQKDLREECVKLKTRVFDLEQQNRTLSILFQQRVRPTSDLLLQKLHSRLLDLSSGDLLSEVERNRSLTQSRTDAEVHEHQLNTKSALKCPGLGAVIPGHLCPRNSYSSSSELSLSSTCSEYSSGSSYTWHDGKNLRKRQSSQNWDKRLSIDSSLPSGFASPTNELPPTRIKESHILEGLRKLQKRKVLLEPPSVITKWGYKDCMNSNEGIYSPGIKSSSLKEYPPCKTADLGSPCKEPHKTFVYDLDSHVDADDDPSTLALLQAVPNQSCRPHGSKLTHSVSDSLFGWETNRKHFLEGTSSVYPKERPEKLTSCASSCPLEMKLCPSVQTPQVQRERGPQGQGHGRMALNLQLSDTDDNETFDELHIESSDEKSPSDVSLAADTDKSVENLDVLVGFGKSLCGSPEEEEKQVPIPSETRPKTFSFIKQQRVVKRTSSEECVTVIFDAEDGEPIEFSSHQTGVVTVTRNEISINSTPAGPKAEHTELLPQGIACLQPRAAARDYTFFKRSEEDTEKNIPKDNVDNVPRVSTESFSSRTVTQNPQQQKLVKPTHNISCQSNSRSSAPMGIYQKQNLTKIPPRGKSSPQKSKLMEPEATTLLPSSGLVTLEKSPALAPGKLSRFMKTESSGPLFELRSDPHIPKHSAQLPHSSRMPSRRDWVQCPKSQTPGSRSRPAIESSDSGEPPTRDEHCGSGPEAGVKSPSPPPPPGRSVSLLARPSYDYSPAPSSTKSETRVPSETARTPFKSPLLKGISAPVISSNPATTEVQRKKPSVAFKKPIFTHPMPSPEAVIQTRCPAHAPSSSFTVMALGPPKVSPKRGVPKTSPRQTLGTPQRDIGLQTPRISPSTHEPLEMTSSKSVSPGRKGQLNDSASTPPKPSFLGVNESPSSQVSSSSSSSSPAKSHNSPHGCQSAHEKGLKTRLPVGLKVLMKSPQLLRKSSTVPGKHEKDSLNEASKSSVAVNKSKPEDSKNPASMEITAGERNVTLPDSQAQGSLADGLPLETALQEPLESSIPGSDGRDGVDNRSMRRSLSSSKPHLKPALGMNGAKARSHSFSTHSGDKPSTPPIEGSGKVRTQIITNTAERGNSLTRQNSSTESSPNKAPSAPMLESLPSVGRPSGHPSSGKGSLGSSGSFSSQHGSPSKLPLRIPPKSEGLLIPPGKEDQQAFTQGECPSANVAVLGEPGSDRRSCPPTPTDCPEALQSPGRTQHPSTFETSSTSKLETSGRHPDASATATDAVSSEAPLSPTIEEKVMLCIQENVEKGQVQTKPTSVEAKQKPGPSFASWFGFRKSRLPALSSRKMDISKTKVEKKDAKVLGFGNRQLKSERKKEKKKPELQCETENELIKDTKSADNPDGGLQSKNNRRTPQDIYNQLKIEPRNRHSPVACSTKDTFMTELLNRVDKKAAPQTESGSSNASCRNVLKGSSQGSCLIGSSISTQGNHKKNMKIKADMEVPKDSLVKEANENLQEDEDDAVADSVFQSHIIESNCQMRTLDSGIGTFPLPDSGNRSTGRYLCQPDSPEDAEPLLPLQSALSAVSSMRAQTLEREVPSSTDGQRPADSAIVHSTSDPIMTARGMRPLQSRLPKPASSGKVSSQKQNEAEPRPQTCSSFGYAEDPMASQPLPDWGSEVAATGTQDKAPRMCTYSASGGSNSDSDLDYGDNGFGAGRGQLVKALKSAAPEIETT

SEQ ID NO: 563 - protein, 1334 aa, Homo sapiens
MSEAMDQPAGGPGNPRPGEGDDGSMEPGTCQELLHRLRELEAENSALAQANENQRETYERCLDEVANHVVQALLNQKDLREECIKLKKRVFDLERQNQMLSALFQQKLQLTTGSLPQIPLTPLQPPSEPPASPSLSSTEGPAAPLPLGHCAGQREVCWEQQLRPGGPGPPAAPPPALDALSPFLRKKAQILEVLRALEETDPLLLCSPATPWRPPGQGPGSPEPINGELCGPPQPEPSPWAPCLLLGPGNLGGLLHWERLLGGLGGEEDTGRPWGPSRGPPQAQGTSSGPNCAPGSSSSSSSDEAGDPNEAPSPDTLLGALARRQLNLGQLLEDTESYLQAFLAGAAGPLNGDHPGPGQSSSPDQAPPQLSKSKGLPKSAWGGGTPEAHRPGFGATSEGQGPLPFLSMFMGAGDAPLGSRPGHPHSSSQVKSKLQIGPPSPGEAQGPLLPSPARGLKFLKLPPTSEKSPSPGGPQLSPQLPRNSRIPCRNSGSDGSPSPLLARRGLGGGELSPEGAQGLPTSPSPCYTTPDSTQLRPPQSALSTTLSPGPVVSPCYENILDLSRSTFRGPSPEPPPSPLQVPTYPQLTLEVPQAPEVLRSPGVPPSPCLPESYPYGSPQEKSLDKAGSESPHPGRRTPGNSSKKPSQGSGRRPGDPGSTPLRDRLAALGKLKTGPEGALGSEKNGVPARPGTEKTRGPGKSGESAGDMVPSIHRPLEQLEAKGGIRGAVALGTNSLKQQEPGLMGDPGARVYSSHSMGARVDLEPVSPRSCLTKVELAKSRLAGALCPQVPRTPAKVPTSAPSLGKPNKSPHSSPTKLPSKSPTKVVPRPGAPLVTKESPKPDKGKGPPWADCGSTTAQSTPLVPGPTDPSQGPEGLAPHSAIEEKVMKGIEENVLRLQGQERAPGAEVKHRNTSSIASWFGLKKSKLPALNRRTEATKNKEGAGGGSPLRREVKMEARKLEAESLNISKLMAKAEDLRRALEEEKAYLSSRARPRPGGPAPGPNTGLGQVQGQLAGMYQGADTFMQQLLNRVDGKELPSKSWREPKPEYGDFQPVSSDPKSPWPACGPRNGLVGPLQGCGKPPGKPSSEPGRREEMPSEDSLAEPVPTSHFTACGSLTRTLDSGIGTFPPPDHGSSGTPSKNLPKTKPPRLDPPPGVPPARPPPLTKVPRRAHTLEREVPGIEELLVSGRHPSMPAFPALLPAAPGHRGHETCPDDPCEDPGPTPPVQLAKNWTFPNTRAAGSSSDPLMCPPRQLEGLPRTPMALPVDRKRSQEPSRPSPTPQGPPFGGSRTPSTSDMAEEGRVASGGPPGLETSESLSDSLYDSLSSCGSQG

SEQ ID NO: 564 - protein, 2440 aa, Homo sapiens
MSSSGYPPNQGAFSTEQSRYPPHSVQYTFPNTRHQQEFAVPDYRSSHLEVSQASQLLQQQQQQQLRRRPSLLSEFHPGSDRPQERRTSYEPFHPGPSPVDHDSLESKRPRLEQVSDSHFQRVSAAVLPLVHPLPEGLRASADAKKDPAFGGKHEAPSSPISGQPCGDDQNASPSKLSKEELIQSMDRVDREIAKVEQQILKLKKKQQQLEEEAAKPPEPEKPVSPPPVEQKHRSIVQIIYDENRKKAEEAHKIFEGLGPKVELPLYNQPSDTKVYHENIKTNQVMRKKLILFFKRRNHARKQREQKICQRYDQLMEAWEKKVDRIENNPRRKAKESKTREYYEKQFPEIRKQREQQERFQRVGQRGAGLSATIARSEHEISEIIDGLSEQENNEKQMRQLSVIPPMMFDAEQRRVKFINMNGLMEDPMKVYKDRQFMNVWTDHEKEIFKDKFIQHPKNFGLIASYLERKSVPDCVLYYYLTKKNENYKALVRRNYGKRRGRNQQIARPSQEEKVEEKEEDKAEKTEKKEEEKKDEEEKDEKEDSKENTKEKDKIDGTAEETEEREQATPRGRKTANSQGRRKGRITRSMTNEAAAASAAAAAATEEPPPPLPPPPEPISTEPVETSRWTEEEMEVAKKGLVEHGRNWAAIAKMVGTKSEAQCKNFYFNYKRRHNLDNLLQQHKQKTSRKPREERDVSQCESVASTVSAQEDEDIEASNEEENPEDSEVEAVKPSEDSPENATSRGNTEPAVELEPTTETAPSTSPSLAVPSTKPAEDESVETQVNDSISAETAEQMDVDQQEHSAEEGSVCDPPPATKADSVDVEVRVPENHASKVEGDNTKERDLDRASEKVEPRDEDLVVAQQINAQRPEPQSDNDSSATCSADEDVDGEPERQRMFPMDSKPSLLNPTGSILVSSPLKPNPLDLPQLQHRAAVIPPMVSCTPCNIPIGTPVSGYALYQRHIKAMHESALLEEQRQRQEQIDLECRSSTSPCGTSKSPNREWEVLQPAPHQVITNLPEGVRLPTTRPTRPPPPLIPSSKTTVASEKPSFIMGGSISQGTPGTYLTSHNQASYTQETPKPSVGSISLGLPRQQESAKSATLPYIKQEEFSPRSQNSQPEGLLVRAQHEGVVRGTAGAIQEGSITRGTPTSKISVESIPSLRGSITQGTPALPQTGIPTEALVKGSISRMPIEDSSPEKGREEAASKGHVIYEGKSGHILSYDNIKNAREGTRSPRTAHEISLKRSYESVEGNIKQGMSMRESPVSAPLEGLICRALPRGSPHSDLKERTVLSGSIMQGTPRATTESFEDGLKYPKQIKRESPPIRAFEGAITKGKPYDGITTIKEMGRSIHEIPRQDILTQESRKTPEVVQSTRPIIEGSISQGTPIKFDNNSGQSAIKHNVKSLITGPSKLSRGMPPLEIVPENIKVVERGKYEDVKAGETVRSRHTSVVSSGPSVLRSTLHEAPKAQLSPGIYDDTSARRTPVSYQNTMSRGSPMMNRTSDVTISSNKSTNHERKSTLTPTQRESIPAKSPVPGVDPVVSHSPFDPHHRGSTAGEVYRSHLPTHLDPAMPFHRALDPAAAAYLFQRQLSPTPGYPSQYQLYAMENTRQTILNDYITSQQMQVNLRPDVARGLSPREQPLGLPYPATRGIIDLTNMPPTILVPHPGGTSTPPMDRITYIPGTQITFPPRPYNSASMSPGHPTHLAAAASAEREREREREKERERERIAAASSDLYLRPGSEQPGRPGSHGYVRSPSPSVRTQETMLQQRPSVFQGTNGTSVITPLDPTAQLRIMPLPAGGPSISQGLPASRYNTAADALAALVDAAASAPQMDVSKTKESKHEAARLEENLRSRSAAVSEQQQLEQKTLEVEKRSVQCLYTSSAFPSGKPQPHSSVVYSEAGKDKGPPPKSRYEEELRTRGKTTITAANFIDVIITRQIASDKDARERGSQSSDSSSSLSSHRYETPSDAIEVISPASSPAPPQEKLQTYQPEVVKANQAENDPTRQYEGPLHHYRPQQESPSPQQQLPPSSQAEGMGQVPRTHRLITLADHICQIITQDFARNQVSSQTPQQPPTSTFQNSPSALVSTPVRTKTSNRYSPESQAQSVHHQRPGSRVSPENLVDKSRGSRPGKSPERSHVSSEPYEPISPPQVPVVHEKQDSLLLLSQRGAEPAEQRNDARSPGSISYLPSFFTKLENTSPMVKSKKQEIFRKLNSSGGGDSDMAAAQPGTEIFNLPAVTTSGSVSSRGHSFADPASNLGLEDIIRKALMGSFDDKVEDHGVVMSQPMGVVPGTANTSVVTSGETRREEGDPSPHSGGVCKPKLISKSNSRKSKSPIPGQGYLGTERPSSVSSVHSEGDYHRQTPGWAWEDRPSSTGSTQFPYNPLTMRMLSSTPPTPIACAPSAVNQAAPHQQNRIWEREPAPLLSAQYETLSDSDD

SEQ ID NO: 565 - protein, 304 aa, Homo sapiens
MLQKPRNRGRSGGQAERDRDWSHSGNPGASRAGEDARVLRDGFAEEAPSTSRGPGGSQGSQGPSPQGARRAQAAPAVGPRSQKQLELKVSELVQFLLIKDQKKIPIKRADILKHVIGDYKDIFPDLFKRAAERLQYVFGYKLVELEPKSNTYILINTLEPVEEDAEMRGDQGTPTTGLLMIVLGLIFMKGNTIKETEAWDFLRRLGVYPTKKHLIFGDPKKLITEDFVRQRYLEYRRIPHTDPVDYEFQWGPRTNLETSKMKVLKFVAKVHNQDPKDWPAQYCEALADEENRARPQPSGPAPSS

SEQ ID NO: 566 - skipped

SEQ ID NO: 567 - protein, 116 aa, Homo sapiens
MAGVLKKTTGLVGLAVCNTPHERLRILYTKILDVLEEIPKNAAYRKYTEQITNEKLAMVKAEPDVKKLEDQLQGGQLEEVILQAEHELNLARKMREWKLWEPLVEEPPADQWKWPI

SEQ ID NO: 568 - protein, 543 aa, Homo sapiens
MSSFSYEPYYSTSYKRRYVETPRVHISSVRSGYSTARSAYSSYSAPVSSSLSVRRSYSSSSGSLMPSLENLDLSQVAAISNDLKSIRTQEKAQLQDLNDRFASFIERVHELEQQNKVLEAELLVLRQKHSEPSRFRALYEQEIRDLRLAAEDATNEKQALQGEREGLEETLRNLQARYEEEVLSREDAEGRLMEARKGADEAALARAELEKRIDSLMDEISFLKKVHEEEIAELQAQIQYAQISVEMDVTKPDLSAALKDIRAQYEKLAAKNMQNAEEWFKSRFTVLTESAAKNTDAVRAAKDEVSESRRLLKAKTLEIEACRGMNEALEKQLQELEDKQNADISAMQDTINKLENELRTTKSEMARYLKEYQDLLNVKMALDIEIAAYRKLLEGEETRLSFTSVGSITSGYSQSSQVFGRSAYGGLQTSSYLMSTRSFPSYYTSHVQEEQIEVEETIEAAKAEEAKDEPPSEGEAEEEEKDKEEAEEEEAAEEEEAAKEESEEAKEEEEGGEGEEGEETKEAEEEEKKVEGAGEEQAAKKKD

SEQ ID NO: 569 - protein, 810 aa, Homo sapiens
MPMDLILVVWFCVCTARTVVGFGMDPDLQMDIVTELDLVNTTLGVAQVSGMHNASKAFLFQDIEREIHAAPHVSEKLIQLFRNKSEFTILATVQQKPSTSGVILSIRELEHSYFELESSGLRDEIRYHYIHNGKPRTEALPYRMADGQWHKVALSVSASHLLLHVDCNRIYERVIDPPDTNLPPGINLWLGQRNQKHGLFKGIIQDGKIIFMPNGYITQCPNLNHTCPTCSDFLSLVQGIMDLQELLAKMTAKLNYAETRLSQLENCHCEKTCQVSGLLYRDQDSWVDGDHCRNCTCKSGAVECRRMSCPPLNCSPDSLPVHIAGQCCKVCRPKCIYGGKVLAEGQRILTKSCRECRGGVLVKITEMCPPLNCSEKDHILPENQCCRVCRGHNFCAEGPKCGENSECKNWNTKATCECKSGYISVQGDSAYCEDIDECAAKMHYCHANTVCVNLPGLYRCDCVPGYIRVDDFSCTEHDECGSGQHNCDENAICTNTVQGHSCTCKPGYVGNGTICRAFCEEGCRYGGTCVAPNKCVCPSGFTGSHCEKDIDECSEGIIECHNHSRCVNLPGWYHCECRSGFHDDGTYSLSGESCIDIDECALRTHTCWNDSACINLAGGFDCLCPSGPSCSGDCPHEGGLKHNGQVWTLKEDRCSVCSCKDGKIFCRRTACDCQNPSADLFCCPECDTRVTSQCLDQNGHKLYRSGDNWTHSCQQCRCLEGEVDCWPLTCPNLSCEYTAILEGECCPRCVSDPCLADNITYDIRKTCLDSYGVSRLSGSVWTMAGSPCTTCKCKNGRVCCSVDFECLQNN

SEQ ID NO: 570 - protein, 1461 aa, Homo sapiens
MAAERGARRLLSTPSFWLYCLLLLGRRAPGAAAARSGSAPQSPGASIRTFTPFYFLVEPVDTLSVRGSSVILNCSAYSEPSPKIEWKKDGTFLNLVSDDRRQLLPDGSLFISNVVHSKHNKPDEGYYQCVATVESLGTIISRTAKLIVAGLPRFTSQPEPSSVYAGNNAILNCEVNADLVPFVRWEQNRQPLLLDDRVIKLPSGMLVISNATEGDGGLYRCVVESGGPPKYSDEVELKVLPDPEVISDLVFLKQPSPLVRVIGQDVVLPCVASGLPTPTIKWMKNEEALDTESSERLVLLAGGSLEISDVTEDDAGTYFCIADNGNETIEAQAELTVQAQPEFLKQPTNIYAHESMDIVFECEVTGKPTPTVKWVKNGDMVIPSDYFKIVKEHNLQVLGLVKSDEGFYQCIAENDVGNAQAGAQLIILEHAPATTGPLPSAPRDVVASLVSTRFIKLTWRTPASDPHGDNLTYSVFYTKEGIARERVENTSHPGEMQVTIQNLMPATVYIFRVMAQNKHGSGESSAPLRVETQPEVQLPGPAPNLRAYAASPTSITVTWETPVSGNGEIQNYKLYYMEKGTDKEQDVDVSSHSYTINGLKKYTEYSFRVVAYNKHGPGVSTPDVAVRTLSDVPSAAPQNLSLEVRNSKSIMIHWQPPAPATQNGQITGYKIRYRKASRKSDVTETLVSGTQLSQLIEGLDRGTEYNFRVAALTINGTGPATDWLSAETFESDLDETRVPEVPSSLHVRPLVTSIVVSWTPPENQNIVVRGYAIGYGIGSPHAQTIKVDYKQRYYTIENLDPSSHYVITLKAFNNVGEGIPLYESAVTRPHTDTSEVDLFVINAPYTPVPDPTPMMPPVGVQASILSHDTIRITWADNSLPKHQKITDSRYYTVRWKTNIPANTKYKNANATTLSYLVTGLKPNTLYEFSVMVTKGRRSSTWSMTAHGTTFELVPTSPPKDVTVVSKEGKPKTIIVNWQPPSEANGKITGYIIYYSTDVNAEIHDWVIEPVVGNRLTHQIQELTLDTPYYFKIQARNSKGMGPMSEAVQFRTPKADSSDKMPNDQASGSGGKGSRLPDLGSDYKPPMSGSNSPHGSPTSPLDSNMLLVIIVSVGVITIVVVVIIAVFCTRRTTSHQKKKRAACKSVNGSHKYKGNSKDVKPPDLWIHHERLELKPIDKSPDPNPIMTDTPIPRNSQDITPVDNSMDSNIHQRRNSYRGHESEDSMSTLAGRRGMRPKMMMPFDSQPPQPVISAHPIHSLDNPHHHFHSSSLASPARSHLYHPGSPWPIGTSMSLSDRANSTESVRNTPSTDTMPASSSQTCCTDHQDPEGATSSSYLASSQEEDSGQSLPTAHVRPSHPLKSFAVPAIPPPGPPTYDPALPSTPLLSQQALNHHIHSVKTASIGTLGRSRPPMPVVVPSAPEVQETTRMLEDSESSYEPDELTKEMAHLEGLMKDLNAITTA

SEQ ID NO: 571 - protein, 2839 aa, Homo sapiens
MAAHRPVEWVQAVVSRFDEQLPIKTGQQNTHTKVSTEHNKECLINISKYKFSLVISGLTTILKNVNNMRIFGEAAEKNLYLSQLIILDTLEKCLAGQPKDTMRLDETMLVKQLLPEICHFLHTCREGNQHAAELRNSASGVLFSLSCNNFNAVFSRISTRLQELTVCSEDNVDVHDIELLQYINVDCAKLKRLLKETAFKFKALKKVAQLAVINSLEKAFWNWVENYPDEFTKLYQIPQTDMAECAEKLFDLVDGFAESTKRKAAVWPLQIILLILCPEIIQDISKDVVDENNMNKKLFLDSLRKALAGHGGSRQLTESAAIACVKLCKASTYINWEDNSVIFLLVQSMVVDLKNLLFNPSKPFSRGSQPADVDLMIDCLVSCFRISPHNNQHFKICLAQNSPSTFHYVLVNSLHRIITNSALDWWPKIDAVYCHSVELRNMFGETLHKAVQGCGAHPAIRMAPSLTFKEKVTSLKFKEKPTDLETRSYKYLLLSMVKLIHADPKLLLCNPRKQGPETQGSTAELITGLVQLVPQSHMPEIAQEAMEALLVLHQLDSIDLWNPDAPVETFWEISSQMLFYICKKLTSHQMLSSTEILKWLREILICRNKFLLKNKQADRSSCHFLLFYGVGCDIPSSGNTSQMSMDHEELLRTPGASLRKGKGNSSMDSAAGCSGTPPICRQAQTKLEVALYMFLWNPDTEAVLVAMSCFRHLCEEADIRCGVDEVSVHNLLPNYNTFMEFASVSNMMSTGRAALQKRVMALLRRIEHPTAGNTEAWEDTHAKWEQATKLILNYPKAKMEDGQAAESLHKTIVKRRMSHVSGGGSIDLSDTDSLQEWINMTGFLCALGGVCLQQRSNSGLATYSPPMGPVSERKGSMISVMSSEGNADTPVSKFMDRLLSLMVCNHEKVGLQIRTNVKDLVGLELSPALYPMLFNKLKNTISKFFDSQGQVLLTDTNTQFVEQTIAIMKNLLDNHTEGSSEHLGQASIETMMLNLVRYVRVLGNMVHAIQIKTKLCQLVEVMMARRDDLSFCQEMKFRNKMVEYLTDWVMGTSNQAADDDVKCLTRDLDQASMEAVVSLLAGLPLQPEEGDGVELMEAKSQLFLKYFTLFMNLLNDCSEVEDESAQTGGRKRGMSRRLASLRHCTVLAMSNLLNANVDSGLMHSIGLGYHKDLQTRATFMEVLTKILQQGTEFDTLAETVLADRFERLVELVTMMGDQGELPIAMALANVVPCSQWDELARVLVTLFDSRHLLYQLLWNMFSKEVELADSMQTLFRGNSLASKIMTFCFKVYGATYLQKLLDPLLRIVITSSDWQHVSFEVDPTRLEPSESLEENQRNLLQMTEKFFHAIISSSSEFPPQLRSVCHCLYQATCHSLLNKATVKEKKENKKSVVSQRFPQNSIGAVGSAMFLRFINPAIVSPYEAGILDKKPPPRIERGLKLMSKILQSIANHVLFTKEEHMRPFNDFVKSNFDAARRFFLDIASDCPTSDAVNHSLSFISDGNVLALHRLLWNNQEKIGQYLSSNRDHKAVGRRPFDKMATLLAYLGPPEHKPVADTHWSSLNLTSSKFEEFMTRHQVHEKEEFKALKTLSIFYQAGTSKAGNPIFYYVARRFKTGQINGDLLIYHVLLTLKPYYAKPYEIVVDLTHTGPSNRFKTDFLSKWFVVFPGFAYDNVSAVYIYNCNSWVREYTKYHERLLTGLKGSKRLVFIDCPGKLAEHIEHEQQKLPAATLALEEDLKVFHNALKLAHKDTKVSIKVGSTAVQVTSAERTKVLGQSVFLNDIYYASEIEEICLVDENQFTLTIANQGTPLTFMHQECEAIVQSIIHIRTRWELSQPDSIPQHTKIRPKDVPGTLLNIALLNLGSSDPSLRSAAYNLLCALTCTFNLKIEGQLLETSGLCIPANNTLFIVSISKTLAANEPHLTLEFLEECISGFSKSSIELKHLCLEYMTPWLSNLVRFCKHNDDAKRQRVTAILDKLITMTINEKQMYPSIQAKIWGSLGQITDLLDVVLDSFIKTSATGGLGSIKAEVMADTAVALASGNVKLVSSKVIGRMCKIIDKTCLSPTPTLEQHLMWDDIAILARYMLMLSFNNSLDVAAHLPYLFHVVTFLVATGPLSLRASTHGLVINIIHSLCTCSQLHFSEETKQVLRLSLTEFSLPKFYLLFGISKVKSAAVIAFRSSYRDRSFSPGSYERETFALTSLETVTEALLEIMEACMRDIPTCKWLDQWTELAQRFAFQYNPSLQPRALVVFGCISKRVSHGQIKQIIRILSKALESCLKGPDTYNSQVLIEATVIALTKLQPLLNKDSPLHKALFWVAVAVLQLDEVNLYSAGTALLEQNLHTLDSLRIFNDKSPEEVFMAIRNPLEWHCKQMDHFVGLNFNSNFNFALVGHLLKGYRHPSPAIVARTVRILHTLLTLVNKHRNCDKFEVNTQSVAYLAALLTVSEEVRSRCSLKHRKSLLLTDISMENVPMDTYPIHHGDPSYRTLKETQPWSSPKGSEGYLAATYPTVGQTSPRARKSMSLDMGQPSQANTKKLLGTRKSFDHLISDTKAPKRQEMESGITTPPKMRRVAETDYEMETQRISSSQQHPHLRKVSVSESNVLLDEEVLTDPKIQALLLTVLATLVKYTTDEFDQRILYEYLAEASVVFPKVFPVVHNLLDSKINTLLSLCQDPNLLNPIHGIVQSVVYHEESPPQYQTSYLQSFGFNGLWRFAGPFSKQTQIPDYAELIVKFLDALIDTYLPGIDEETSEESLLTPTSPYPPALQSQLSITANLNLSNSMTSLATSQHSPGIDKENVELSPTTGHCNSGRTRHGSASQVQKQRSAGSFKRNSIKKIV

SEQ ID NO: 572 - protein, 554 aa, Homo sapiens
MQMCRPASSSVLYVPTRWPGGCGATWQSCPSPPPRRTRIPQRPAVMYSPLCLTQDEFHPFIEALLPHVRAFAYTWFNLQARKRKYFKKHEKRMSKEEERAVKDELLSEKPEVKQKWASRLLAKLRKDIRPEYREDFVLTVTGKKPPCCVLSNPDQKGKMRRIDCLRQADKVWRLDLVMVILFKGIPLESTDGERLVKSPQCSNPGLCVQPHHIGVSVKELDLYLAYFVHAADSSQSESPSQPSDADIKDQPENGHLGFQDSFVTSGVFSVTELVRVSQTPIAAGTGPNFSLSDLESSSYYSMSPGAMRRSLPSTSSTSSTKRLKSVEDEMDSPGEEPFYTGQGRSPGSGSQSSGWHEVEPGMPSPTTLKKSEKSGFSSPSPSQTSSLGTAFTQHHRPVITGPRASPHATPSTLHFPTSPIIQQPGPYFSHPAIRYHPQETLKEFVQLVCPDAGQQAGQVGFLNPNGSSQGKVHNPFLPTPMLPPPPPPPMARPVPLPVPDTKPPTTSTEGGAASPTSPTYSTPSTSPANRFVSVGPRDPSFVNIPQQTQSWYLG

SEQ ID NO: 573 - protein, 510 aa, Homo sapiens
MEMSWARQSLAGIPAACDEFHPFIEALLPHVRAFSYTWFNLQARKRKYFKKHEKRMSKDEERAVKDELLGEKPEIKQKWASRLLAKLRKDIRPEFREDFVLTITGKKPPCCVLSNPDQKGKIRRIDCLRQADKVWRLDLVMVILFKGIPLESTDGERLYKSPQCSNPGLCVQPHHIGVTIKELDLYLAYFVHTPESGQSDSSNQQGDADIKPLPNGHLSFQDCFVTSGVWNVTELVRVSQTPVATASGPNFSLADLESPSYYNINQVTLGRRSITSPPSTSTTKRPKSIDDSEMESPVDDVFYPGTGRSPAAGSSQSSGWPNDVDAGPASLKKSGKLDFCSALSSQGSSPRMAFTHHPLPVLAGVRPGSPRATASALHFPSTSIIQQSSPYFTHPTIRYHHHHGQDSLKEFVQFVCSDGSGQATGQPNGSGQGKVPGSFLLPPPPPVARPVPLPMPDSKSTSTAPDGAALTPPSPSFATTGASSANRFVSIGPRDGNFLNIPQQSQSWFL

SEQ ID NO: 574 - protein, 1382 aa, Homo sapiens
MDEEENHYVSQLREVYSSCDTTGTGFLDRQELTQLCLKLHLEQQLPVLLQTLLGNDHFARVNFEEFKEGFVAVLSSNAGVRPSDEDSSSLESAASSAIPPKYVNGSKWYGRRSRPELCDAATEARRVPEQQTQASLKSHLWRSASLESVESPKSDEEAESTKEAQNELFEAQGQLQTWDSEDFGSPQKSCSPSFDTPESQIRGVWEELGVGSSGHLSEQELAVVCQSVGLQGLEKEELEDLFNKLDQDGDGKVSLEEFQLGLFSHEPALLLESSTRVKPSKAWSHYQVPEESGCHTTTTSSLVSLCSSLRLFSSIDDGSGFAFPDQVLAMWTQEGIQNGREILQSLDFSVDEKVNLLELTWALDNELMTVDSAVQQAALACYHQELSYQQGQVEQLARERDKARQDLERAEKRNLEFVKEMDDCHSTLEQLTEKKIKHLEQGYRERLSLLRSEVEAERELFWEQAHRQRAALEWDVGRLQAEEAGLREKLTLALKENSRLQKEIVEVVEKLSDSERLALKLQKDLEFVLKDKLEPQSAELLAQEERFAAVLKEYELKCRDLQDRNDELQAELEGLWARLPKNRHSPSWSPDGRRRQLPGLGPAGISFLGNSAPVSIETELMMEQVKEHYQDLRTQLETKVNYYEREIAALKRNFEKERKDMEQARRREVSVLEGQKADLEELHEKSQEVIWGLQEQLQDTARGPEPEQMGLAPCCTQALCGLALRHHSHLQQIRREAEAELSGELSGLGALPARRDLTLELEEPPQGPLPRGSQRSEQLELERALKLQPCASEKRAQMCVSLALEEEELELARGKRVDGPSLEAEMQALPKDGLVAGSGQEGTRGLLPLRPGCGERPLAWLAPGDGRESEEAAGAGPRRRQAQDTEATQSPAPAPAPASHGPSERWSRMQPCGVDGDIVPKEPEPFGASAAGLEQPGARELPLLGTERDASQTQPRMWEPPLRPAASCRGQAERLQAIQEERARSWSRGTQEQASEQQARAEGALEPGCHKHSVEVARRGSLPSHLQLADPQGSWQEQLAAPEEGETKIALEREKDDMETKLLHLEDVVRALEKHVDLRENDRLEFHRLSEENTLLKNDLGRVRQELEAAESTHDAQRKEIEVLKKDKEKACSEMEVLNRQNQNYKDQLSQLNVRVLQLGQEASTHQAQNEEHRVTIQMLTQSLEEVVRSGQQQSDQIQKLRVELECLNQEHQSLQLPWSELTQTLEESQDQVQGAHLRLRQAQAQHLQEVRLVPQDRVAELHRLLSLQGEQARRRLDAQREEHEKQLKATEERVEEAEMILKNMEMLLQEKVDKLKEQFEKNTKSDLLLKELYVENAHLVRALQATEEKQRGAEKQSRLLEEKVRALNKLVSRIAPAALSV

SEQ ID NO: 575 - protein, 329 aa, Homo sapiens
MGTAAAAAAAAAAAAAGEGARSPSPAAVSLGLGVAVVSSLVNGSTFVLQKKGIVRAKRRGTSYLTDIVWWAGTIAMAVGQIGNFLAYTAVPTVLVTPLGALGVPFGSILASYLLKEKLNILGKLGCLLSCAGSVVLIIHSPKSESVTTQAELEEKLTNPVFVGYLCIVLLMLLLLIFWIAPAHGPTNIMVYISICSLLGSFTVPSTKGIGLAAQDILHNNPSSQRALCLCLVLLAVLGCSIIVQFRYINKALECFDSSVFGAIYYVVFTTLVLLASAILFREWSNVGLVDFLGMACGFTTVSVGIVLIQVFKEFNFNLGEMNKSNMKTD

SEQ ID NO: 576 - protein, 360 aa, Homo sapiens
MSQGRGKYDFYIGLGLAMSSSIFIGGSFILKKKGLLRLARKGSMRAGQGGHAYLKEWLWWAGLLSMGAGEVANFAAYAFAPATLVTPLGALSVLVSAILSSYFLNERLNLHGKIGCLLSILGSTVMVIHAPKEEEIETLNEMSHKLGDPGFVVFATLVVIVALILIFVVGPRHGQTNILVYITICSVIGAFSVSCVKGLGIAIKELFAGKPVLRHPLAWILLLSLIVCVSTQINYLNRALDIFNTSIVTPIYYVFFTTSVLTCSAILFKEWQDMPVDDVIGTLSGFFTIIVGIFLLHAFKDVSFSLASLPVSFRKDEKAMNGNLSNMYEVLNNNEESLTCGIEQHTGENVSRRNGNLTAF

SEQ ID NO: 577 - protein, 2804 aa, Homo sapiens
MNGDMPHVPITTLAGIASLTDLLNQLPLPSPLPATTTKSLLFNARIAEEVNCLLACRDDNLVSQLVHSLNQVSTDHIELKDNLGSDDPEGDIPVLLQAVLARSPNVFREKSMQNRYVQSGMMMSQYKLSQNSMHSSPASSNYQQTTISHSPSSRFVPPQTSSGNRFMPQQNSPVPSPYAPQSPAGYMPYSHPSSYTTHPQMQQASVSSPIVAGGLRNIHDNKVSGPLSGNSANHHADNPRHGSSEDYLHMVHRLSSDDGDSSTMRNAASFPLRSPQPVCSPAGSEGTPKGSRPPLILQSQSLPCSSPRDVPPDILLDSPERKQKKQKKMKLGKDEKEQSEKAAMYDIISSPSKDSTKLTLRLSRVRSSDMDQQEDMISGVENSNVSENDIPFNVQYPGQTSKTPITPQDINRPLNAAQCLSQQEQTAFLPANQVPVLQQNTSVAAKQPQTSVVQNQQQISQQGPIYDEVELDALAEIERIERESAIERERFSKEVQDKDKPLKKRKQDSYPQEAGGATGGNRPASQETGSTGNGSRPALMVSIDLHQAGRVDSQASITQDSDSIKKPEEIKQCNDAPVSVLQEDIVGSLKSTPENHPETPKKKSDPELSKSEMKQSESRLAESKPNENRLVETKSSENKLETKVETQTEELKQNESRTTECKQNESTIVEPKQNENRLSDTKPNDNKQNNGRSETTKSRPETPKQKGESRPETPKQKSDGHPETPKQKGDGRPETPKQKGESRPETPKQKNEGRPETPKHRHDNRRDSGKPSTEKKPEVSKHKQDTKSDSPRLKSERAEALKQRPDGRSVSESLRRDHDNKQKSDDRGESERHRGDQSRVRRPETLRSSSRNEHGIKSDSSKTDKLERKHRHESGDSRERPSSGEQKSRPDSPRVKQGDSNKSRSDKLGFKSPTSKDDKRTEGNKSKVDTNKAHPDNKAEFPSYLLGGRSGALKNFVIPKIKRDKDGNVTQETKKMEMKGEPKDKVEKIGLVEDLNKGAKPVVVLQKLSLDDVQKLIKDREDKSRSSLKPIKNKPSKSNKGSIDQSVLKELPPELLAEIESTMPLCERVKMNKRKRSTVNEKPKYAEISSDEDNDSDEAFESSRKRHKKDDDKAWEYEERDRRSSGDHRRSGHSHEGRRSSGGGRYRNRSPSDSDMEDYSPPPSLSEVARKMKKKEKQKKRKAYEPKLTPEEMMDSSTFKRFTASIENILDNLEDMDFTAFGDDDEIPQELLLGKHQLNELGSESAKIKAMGIMDKLSTDKTVKVLNILEKNIQDGSKLSTLLNHNNDTEEEERLWRDLIMERVTKSADACLTTINIMTSPNMPKAVYIEDVIERVIQYTKFHLQNTLYPQYDPVYRLDPHGGGLLSSKAKRAKCSTHKQRVIVMLYNKVCDIVSSLSELLEIQLLTDTTILQVSSMGITPFFVENVSELQLCAIKLVTAVFSRYEKHRQLILEEIFTSLARLPTSKRSLRNFRLNSSDMDGEPMYIQMVTALVLQLIQCVVHLPSSEKDSNAEEDSNKKIDQDVVITNSYETAMRTAQNFLSIFLKKCGSKQGEEDYRPLFENFVQDLLSTVNKPEWPAAELLLSLLGRLLVHQFSNKSTEMALRVASLDYLGTVAARLRKDAVTSKMDQGSIERILKQVSGGEDEIQQLQKALLDYLDENTETDPSLVFSRKFYIAQWFRDTTLETEKAMKSQKDEESSEGTHHAKEIETTGQIMHRAENRKKFLRSIIKTTPSQFSTLKMNSDTVDYDDACLIVRYLASMRPFAQSFDIYLTQILRVLGENAIAVRTKAMKCLSEVVAVDPSILARLDMQRGVHGRLMDNSTSVREAAVELLGRFVLCRPQLAEQYYDMLIERILDTGISVRKRVIKILRDICIEQPTFPKITEMCVKMIRRVNDEEGIKKLVNETFQKLWFTPTPHNDKEAMTRKILNITDVVAACRDTGYDWFEQLLQNLLKSEEDSSYKPVKKACTQLVDNLVEHILKYEESLADSDNKGVNSGRLVACITTLFLFSKIRPQLMVKHAMTMQPYLTTKCSTQNDFMVICNVAKILELVVPLMEHPSETFLATIEEDLMKLIIKYGMTVVQHCVSCLGAVVNKVTQNFKFVWACFNRYYGAISKLKSQHQEDPNNTSLLTNKPALLRSLFTVGALCRHFDFDLEDFKGNSKVNIKDKVLELLMYFTKHSDEEVQTKAIIGLGFAFIQHPSLMFEQEVKNLYNNILSDKNSSVNLKIQVLKNLQTYLQEEDTRMQQADRDWKKVAKQEDLKEMGDVSSGMSSSIMQLYLKQVLEAFFHTQSSVRHFALNVIALTLNQGLIHPVQCVPYLIAMGTDPEPAMRNKADQQLVEIDKKYAGFIHMKAVAGMKMSYQVQQAINTCLKDPVRGFRQDESSSALCSHLYSMIRGNRQHRRAFLISLLNLFDDTAKTDVTMLLYIADNLACFPYQTQEEPLFIMHHIDITLSVSGSNLLQSFKESMVKDKRKERKSSPSKENESSDSEEEVSRPRKSRKRVDSDSDSDSEDDINSVMKCLPENSAPLIEFANVSQGILLLLMLKQHLKNLCGFSDSKIQKYSPSESAKVYDKAINRKTGVHFHPKQTLDFLRSDMANSKITEEVKRSIVKQYLDFKLLMEHLDPDEEEEEGEVSASTNARNKAITSLLGGGSPKNNTAAETEDDESDGEDRGGGTSGSLRRSKRNSDSTELAAQMNESVDVMDVIAICCPKYKDRPQIARVVQKTSSGFSVQWMAGSYSGSWTEAKRRDGRKLVPWVDTIKESDIIYKKIALTSANKLTNKVVQTLRSLYAAKDGTSS

SEQ ID NO: 578 - protein, 823 aa, Homo sapiens
MALPRCTWPNYVWRAVMACLVHRGLGAPLTLCMLGCLLQAGHVLSQKLDDVDPLVATNFGKIRGIKKELNNEILGPVIQFLGVPYAAPPTGERRFQPPEPPSPWSDIRNATQFAPVCPQNIIDGRLPEVMLPVWFTNNLDVVSSYVQDQSEDCLYLNIYVPTEDDIRDSGGPKPVMVYIHGGSYMEGTGNLYDGSVLASYGNVIVITVNYRLGVLGFLSTGDQAAKGNYGLLDLIQALRWTSENIGFFGGDPLRITVFGSGAGGSCVNLLTLSHYSEGNRWSNSTKGLFQRAIAQSGTALSSWAVSFQPAKYARMLATKVGCNVSDTVELVECLQKKPYKELVDQDIQPARYHIAFGPVIDGDVIPDDPQILMEQGEFLNYDIMLGVNQGEGLKFVENIVDSDDGISASDFDFAVSNFVDNLYGYPEGKDVLRETIKFMYTDWADRHNPETRRKTLLALFTDHQWVAPAVATADLHSNFGSPTYFYAFYHHCQTDQVPAWADAAHGDEVPYVLGIPMIGPTELFPCNFSKNDVMLSAVVMTYWTNFAKTGDPNQPVPQDTKFIHTKPNRFEEVAWTRYSQKDQLYLHIGLKPRVKEHYRANKVNLWLELVPHLHNLNDISQYTSTTTKVPSTDITFRPTRKNSVPVTSAFPTAKQDDPKQQPSPFSVDQRDYSTELSVTIAVGASLLFLNILAFAALYYKKDKRRHDVHRRCSPQRTTTNDLTHAQEEEIMSLQMKHTDLDHECESIHPHEVVLRTACPPDYTLAMRRSPDDVPLMTPNTITMIPNTIPGIQPLHTFNTFTGGQNNTLPHPHPHPHSHSTTRV

SEQ ID NO: 579 - protein, 835 aa, Homo sapiens
MWLLALCLVGLAGAQRGGGGPGGGAPGGPGLGLGSLGEERFPVVNTAYGRVRGVRRELNNEILGPVVQFLGVPYATPPLGARRFQPPEAPASWPGVRNATTLPPACPQNLHGALPAIMLPVWFTDNLEAAATYVQNQSEDCLYLNLYVPTEDGPLTKKRDEATLNPPDTDIRDPGKKPVMLFLHGGSYMEGTGNMFDGSVLAAYGNVIVATLNYRLGVLGFLSTGDQAAKGNYGLLDQIQALRWLSENIAHFGGDPERITIFGSGAGASCVNLLILSHHSEGLFQKAIAQSGTAISSWSVNYQPLKYTRLLAAKVGCDREDSAEAVECLRRKPSRELVDQDVQPARYHIAFGPVVDGDVVPDDPEILMQQGEFLNYDMLIGVNQGEGLKFVEDSAESEDGVSASAFDFTVSNFVDNLYGYPEGKDVLRETIKFMYTDWADRDNGEMRRKTLLALFTDHQWVAPAVATAKLHADYQSPVYFYTFYHHCQAEGRPEWADAAHGDELPYVFGVPMVGATDLFPCNFSKNDVMLSAVVMTYWTNFAKTGDPNQPVPQDTKFIHTKPNRFEEVVWSKFNSKEKQYLHIGLKPRVRDNYRANKVAFWLELVPHLHNLHTELFTTTTRLPPYATRWPPRPPAGAPGTRRPPPPATLPPEPEPEPGPRAYDRFPGDSRDYSTELSVTVAVGASLLFLNILAFAALYYKRDRRQELRCRRLSPPGGSGSGVPGGGPLLPAAGRELPPEEELVSLQLKRGGGVGADPAEALRPACPPDYTLALRRAPDDVPLLAPGALTLLPSGLGPPPPPPPPSLHPFGPFPPPPPTATSHNNTLPHPHSTTRV

SEQ ID NO: 580 - skipped

SEQ ID NO: 581 - protein, 848 aa, Homo sapiens
MWLRLGPPSLSLSPKPTVGRSLCLTLWFLSLALRASTQAPAPTVNTHFGKLRGARVPLPSEILGPVDQYLGVPYAAPPIGEKRFLPPEPPPSWSGIRNATHFPPVCPQNIHTAVPEVMLPVWFTANLDIVATYIQEPNEDCLYLNVYVPTEDVKRISKECARKPNKKICRKGGSGAKKQGEDLADNDGDEDEDIRDSGAKPVMVYIHGGSYMEGTGNMIDGSILASYGNVIVITLNYRVGVLGFLSTGDQAAKGNYGLLDQIQALRWVSENIAFFGGDPRRITVFGSGIGASCVSLLTLSHHSEGLFQRAIIQSGSALSSWAVNYQPVKYTSLLADKVGCNVLDTVDMVDCLRQKSAKELVEQDIQPARYHVAFGPVIDGDVIPDDPEILMEQGEFLNYDIMLGVNQGEGLKFVEGVVDPEDGVSGTDFDYSVSNFVDNLYGYPEGKDTLRETIKFMYTDWADRDNPETRRKTLVALFTDHQWVEPSVVTADLHARYGSPTYFYAFYHHCQSLMKPAWSDAAHGDEVPYVFGVPMVGPTDLFPCNFSKNDVMLSAVVMTYWTNFAKTGDPNKPVPQDTKFIHTKANRFEEVAWSKYNPRDQLYLHIGLKPRVRDHYRATKVAFWKHLVPHLYNLHDMFHYTSTTTKVPPPDTTHSSHITRRPNGKTWSTKRPAISPAYSNENAQGSWNGDQDAGPLLVENPRDYSTELSVTIAVGASLLFLNVLAFAALYYRKDKRRQEPLRQPSPQRGAGAPELGAAPEEELAALQLGPTHHECEAGPPHDTLRLTALPDYTLTLRRSPDDIPLMTPNTITMIPNSLVGLQTLHPYNTFAAGFNSTGLPHSHSTTRV

SEQ ID NO: 582 - protein, 816 aa, Homo sapiens
MSRPQGLLWLPLLFTPVCVMLNSNVLLWLTALAIKFTLIDSQAQYPVVNTNYGKIRGLRTPLPNEILGPVEQYLGVPYASPPTGERRFQPPEPPSSWTGIRNTTQFAAVCPQHLDERSLLHDMLPIWFTANLDTLMTYVQDQNEDCLYLNIYVPTEDDIHDQNSKKPVMVYIHGGSYMEGTGNMIDGSILASYGNVIVITINYRLGILGFLSTGDQAAKGNYGLLDQIQALRWIEENVGAFGGDPKRVTIFGSGAGASCVSLLTLSHYSEGLFQKAIIQSGTALSSWAVNYQPAKYTRILADKVGCNMLDTTDMVECLRNKNYKELIQQTITPATYHIAFGPVIDGDVIPDDPQILMEQGEFLNYDIMLGVNQGEGLKFVDGIVDNEDGVTPNDFDFSVSNFVDNLYGYPEGKDTLRETIKFMYTDWADKENPETRRKTLVALFTDHQWVAPAVATADLHAQYGSPTYFYAFYHHCQSEMKPSWADSAHGDEVPYVFGIPMIGPTELFSCNFSKNDVMLSAVVMTYWTNFAKTGDPNQPVPQDTKFIHTKPNRFEEVAWSKYNPKDQLYLHIGLKPRVRDHYRATKVAFWLELVPHLHNLNEIFQYVSTTTKVPPPDMTSFPYGTRRSPAKIWPTTKRPAITPANNPKHSKDPHKTGPEDTTVLIETKRDYSTELSVTIAVGASLLFLNILAFAALYYKKDKRRHETHRRPSPQRNTTNDIAHIQNEEIMSLQMKQLEHDHECESLQAHDTLRLTCPPDYTLTLRRSPDDIPLMTPNTITMIPNTLTGMQPLHTFNTFSGGQNSTNLPHGHSTTRV

SEQ ID NO: 583 - protein, 816 aa, Homo sapiens
MLRPQGLLWLPLLFTSVCVMLNSNVLLWITALAIKFTLIDSQAQYPVVNTNYGKIQGLRTPLPSEILGPVEQYLGVPYASPPTGERRFQPPESPSSWTGIRNATQFSAVCPQHLDERFLLHDMLPIWFTTSLDTLMTYVQDQNEDCLYLNIYVPMEDDIHEQNSKKPVMVYIHGGSYMEGTGNMIDGSILASYGNVIVITINYRLGILGFLSTGDQAAKGNYGLLDQIQALRWIEENVGAFGGDPKRVTIFGSGAGASCVSLLTLSHYSEGLFQKAIIQSGTALSSWAVNYQPAKYTRILADKVGCNMLDTTDMVECLKNKNYKELIQQTITPATYHIAFGPVIDGDVIPDDPQILMEQGEFLNYDIMLGVNQGEGLKFVDGIVDNEDGVTPNDFDFSVSNFVDNLYGYPEGKDTLRETIKFMYTDWADKENPETRRKTLVALFTDHQWVAPAVATADLHAQYGSPTYFYAFYHHCQSEMKPSWADSAHGDEVPYVFGIPMIGPTELFSCNFSKNDVMLSAVVMTYWTNFAKTGDPNQPVPQDTKFIHTKPNRFEEVAWSKYNPKDQLYLHIGLKPRVRDHYRATKVAFWLELVPHLHNLNEIFQYVSTTTKVPPPDMTSFPYGTRRSPAKIWPTTKRPAITPANNPKHSKDPHKTGPEDTTVLIETKRDYSTELSVTIAVGASLLFLNILAFAALYYKKDKRRHETHRHPSPQRNTTNDITHIQNEEIMSLQMKQLEHDHECESLQAHDTLRLTCPPDYTLTLRRSPDDIPFMTPNTITMIPNTLMGMQPLHTFKTFSGGQNSTNLPHGHSTTRV

SEQ ID NO: 584 - protein, 1468 aa, Homo sapiens
MEDHMFGVQQIQPNVISVRLFKRKVGGLGFLVKERVSKPPVIISDLIRGGAAEQSGLIQAGDIILAVNGRPLVDLSYDSALEVLRGIASETHVVLILRGPEGFTTHLETTFTGDGTPKTIRVTQPLGPPTKAVDLSHQPPAGKEQPLAVDGASGPGNGPQHAYDDGQEAGSLPHANGLAPRPPGQDPAKKATRVSLQGRGENNELLKEIEPVLSLLTSGSRGVKGGAPAKAEMKDMGIQVDRDLDGKSHKPLPLGVENDRVFNDLWGKGNVPVVLNNPYSEKEQPPTSGKQSPTKNGSPSKCPRFLKVKNWETEVVLTDTLHLKSTLETGCTEYICMGSIMHPSQHARRPEDVRTKGQLFPLAKEFIDQYYSSIKRFGSKAHMERLEEVNKEIDTTSTYQLKDTELIYGAKHAWRNASRCVGRIQWSKLQVFDARDCTTAHGMFNYICNHVKYATNKGNLRSAITIFPQRTDGKHDFRVWNSQLIRYAGYKQPDGSTLGDPANVQFTEICIQQGWKPPRGRFDVLPLLLQANGNDPELFQIPPELVLEVPIRHPKFEWFKDLGLKWYGLPAVSNMLLEIGGLEFSACPFSGWYMGTEIGVRDYCDNSRYNILEEVAKKMNLDMRKTSSLWKDQALVEINIAVLYSFQSDKVTIVDHHSATESFIKHMENEYRCRGGCPADWVWIVPPMSGSITPVFHQEMLNYRLTPSFEYQPDPWNTHVWKGTNGTPTKRRAIGFKKLAEAVKFSAKLMGQAMAKRVKATILYATETGKSQAYAKTLCEIFKHAFDAKVMSMEEYDIVHLEHETLVLVVTSTFGNGDPPENGEKFGCALMEMRHPNSVQEERKYPEPLRFFPRKGPPLPNGDTEVHGLAAARDSQHRSYKVRFNSVSSYSDSQKSSGDGPDLRDNFESAGPLANVRFSVFGLGSRAYPHFCAFGHAVDTLLEELGGERILKMREGDELCGQEEAFRTWAKKVFKAACDVFCVGDDVNIEKANNSLISNDRSWKRNKFRLTFVAEAPELTQGLSNVHKKRVSAARLLSRQNLQSPKSSRSTIFVRLHTNGSQELQYQPGDHLGVFPGNHEDLVNALIERLEDAPPVNQMVKVELLEERNTALGVISNWTDELRLPPCTIFQAFKYYLDITTPPTPLQLQQFASLATSEKEKQRLLVLSKGLQEYEEWKWGKNPTIVEVLEEFPSIQMPATLLLTQLSLLQPRYYSISSSPDMYPDEVHLTVAIVSYRTRDGEGPIHHGVCSSWLNRIQADELVPCFVRGAPSFHLPRNPQVPCILVGPGTGIAPFRSFWQQRQFDIQHKGMNPCPMVLVFGCRQSKIDHIYREETLQAKNKGVFRELYTAYSREPDKPKKYVQDILQEQLAESVYRALKEQGGHIYVCGDVTMAADVLKAIQRIMTQQGKLSAEDAGVFISRMRDDNRYHEDIFGVTLRTYEVTNRLRSESIAFIEESKKDTDEVFSS

SEQ ID NO: 585 - protein, 506 aa, Homo sapiens
MPSKTKYNLVDDGHDLRIPLHNEDAFQHGICFEAKYVGSLDVPRPNSRVEIVAAMRRIRYEFKAKNIKKKKVSIMVSVDGVKVILKKKKKLLLLQKKEWTWDESKMLVMQDPIYRIFYVSHDSQDLKIFSYIARDGASNIFRCNVFKSKKKSQAMRIVRTVGQAFEVCHKLSLQHTQQNADGQEDGESERNSNSSGDPGRQLTGAERASTATAEETDIDAVEVPLPGNDVLEFSRGVTDLDAVGKEGGSHTGSKVSHPQEPMLTASPRMLLPSSSSKPPGLGTETPLSTHHQMQLLQQLLQQQQQQTQVAVAQVHLLKDQLAAEAAARLEAQARVHQLLLQNKDMLQHISLLVKQVQELELKLSGQNAMGSQDSLLEITFRSGALPVLCDPTTPKPEDLHSPPLGAGLADFAHPAGSPLGRRDCLVKLECFRFLPPEDTPPPAQGEALLGGLELIKFRESGIASEYESNTDESEERDSWSQEELPRLLNVLQRQELGDGLDDEIAV

SEQ ID NO: 586 - protein, 1153 aa, Homo sapiens
MACPWKFLFKTKFHQYAMNGEKDINNNVEKAPCATSSPVTQDDLQYHNLSKQQNESPQPLVETGKKSPESLVKLDATPLSSPRHVRIKNWGSGMTFQDTLHHKAKGILTCRSKSCLGSIMTPKSLTRGPRDKPTPPDELLPQAIEFVNQYYGSFKEAKIEEHLARVEAVTKEIETTGTYQLTGDELIFATKQAWRNAPRCIGRIQWSNLQVFDARSCSTAREMFEHICRHVRYSTNNGNIRSAITVFPQRSDGKHDFRVWNAQLIRYAGYQMPDGSIRGDPANVEFTQLCIDLGWKPKYGRFDVVPLVLQANGRDPELFEIPPDLVLEVAMEHPKYEWFRELELKWYALPAVANMLLEVGGLEFPGCPFNGWYMGTEIGVRDFCDVQRYNILEEVGRRMGLETHKLASLWKDQAVVEINIAVLHSFQKQNVTIMDHHSAAESFMKYMQNEYRSRGGCPADWIWLVPPMSGSITPVFHQEMLNYVLSPFYYYQVEAWKTHVWQDEKRRPKRREIPLKVLVKAVLFACMLMRKTMASRVRVTILFATETGKSEALAWDLGALFSCAFNPKVVCMDKYRLSCLEEERLLLVVTSTFGNGDCPGNGEKLKKSLFMLKELNNKFRYAVFGLGSSMYPRFCAFAHDIDQKLSHLGASQLTPMGEGDELSGQEDAFRSWAVQTFKAACETFDVRGKQHIQIPKLYTSNVTWDPHHYRLVQDSQPLDLSKALSSMHAKNVFTMRLKSRQNLQSPTSSRATILVELSCEDGQGLNYLPGEHLGVCPGNQPALVQGILERVVDGPTPHQTVRLEALDESGSYWVSDKRLPPCSLSQALTYFLDITTPPTQLLLQKLAQVATEEPERQRLEALCQPSEYSKWKFTNSPTFLEVLEEFPSLRVSAGFLLSQLPILKPRFYSISSSRDHTPTEIHLTVAVVTYHTRDGQGPLHHGVCSTWLNSLKPQDPVPCFVRNASGFHLPEDPSHPCILIGPGTGIAPFRSFWQQRLHDSQHKGVRGGRMTLVFGCRRPDEDHIYQEEMLEMAQKGVLHAVHTAYSRLPGKPKVYVQDILRQQLASEVLRVLHKEPGHLYVCGDVRMARDVAHTLKQLVAAKLKLNEEQVEDYFFQLKSQKRYHEDIFGAVFPYEAKKDRVAVQPSSLEMSAL

SEQ ID NO: 587 - protein, 824 aa, Homo sapiens
MDEDEKDRAKRASRNKSEKKRRDQFNVLIKELSSMLPGNTRKMDKTTVLEKVIGFLQKHNEVSAQTEICDIQQDWKPSFLSNEEFTQLMLEALDGFIIAVTTDGSIIYVSDSITPLLGHLPSDVMDQNLLNFLPEQEHSEVYKILSSHMLVTDSPSPEYLKSDSDLEFYCHLLRGSLNPKEFPTYEYIKFVGNFRSYNNVPSPSCNGFDNTLSRPCRVPLGKEVCFIATVRLATPQFLKEMCIVDEPLEEFTSRHSLEWKFLFLDHRAPPIIGYLPFEVLGTSGYDYYHIDDLELLARCHQHLMQFGKGKSCCYRFLTKGQQWIWLQTHYYITYHQWNSKPEFIVCTHSVVSYADVRVERRQELALEDPPSEALHSSALKDKGSSLEPRQHFNTLDVGASGLNTSHSPSASSRSSHKSSHTAMSEPTSTPTKLMAEASTPALPRSATLPQELPVPGLSQAATMPAPLPSPSSCDLTQQLLPQTVLQSTPAPMAQFSAQFSMFQTIKDQLEQRTRILQANIRWQQEELHKIQEQLCLVQDSNVQMFLQQPAVSLSFSSTQRPEAQQQLQQRSAAVTQPQLGAGPQLPGQISSAQVTSQHLLRESSVISTQGPKPMRSSQLMQSSGRSGSSLVSPFSSATAALPPSLNLTTPASTSQDASQCQPSPDFSHDRQLRLLLSQPIQPMMPGSCDARQPSEVSRTGRQVKYAQSQTVFQNPDAHPANSSSAPMPVLLMGQAVLHPSFPASQPSPLQPAQARQQPPQHYLQVQAPTSLHSEQQDSLLLSTYSQQPGTLGYPQPPPAQPQPLRPPRRVSSLSESSGLQQPPR

SEQ ID NO: 588 - protein, 423 aa, Homo sapiens
MAMVVSSWRDPQDDVAGGNPGGPNPAAQAARGGGGGAGEQQQQAGSGAPHTPQTPGQPGAPATPGTAGDKGQGPPGSGQSQQHIECVVCGDKSSGKHYGQFTCEGCKSFFKRSVRRNLTYTCRANRNCPIDQHHRNQCQYCRLKKCLKVGMRREAVQRGRMPPTQPNPGQYALTNGDPLNGHCYLSGYISLLLRAEPYPTSRYGSQCMQPNNIMGIENICELAARLLFSAVEWARNIPFFPDLQITDQVSLLRLTWSELFVLNAAQCSMPLHVAPLLAAAGLHASPMSADRVVAFMDHIRIFQEQVEKLKALHVDSAEYSCLKAIVLFTSDACGLSDAAHIESLQEKSQCALEEYVRSQYPNQPSRFGKLLLRLPSLRTVSSSVIEQLFFVRLVGKTPIETLIRDMLLSGSSFNWPYMSIQCS

SEQ ID NO: 589 - protein, 984 aa, Homo sapiens
METKGYHSLPEGLDMERRWGQVSQAVERSSLGPTERTDENNYMEIVNVSCVSGAIPNNSTQGSSKEKQELLPCLQQDNNRPGILTSDIKTELESKELSATVAESMGLYMDSVRDADYSYEQQNQQGSMSPAKIYQNVEQLVKFYKGNGHRPSTLSCVNTPLRSFMSDSGSSVNGGVMRAVVKSPIMCHEKSPSVCSPLNMTSSVCSPAGINSVSSTTASFGSFPVHSPITQGTPLTCSPNVENRGSRSHSPAHASNVGSPLSSPLSSMKSSISSPPSHCSVKSPVSSPNNVTLRSSVSSPANINNSRCSVSSPSNTNNRSTLSSPAASTVGSICSPVNNAFSYTASGTSAGSSTLRDVVPSPDTQEKGAQEVPFPKTEEVESAISNGVTGQLNIVQYIKPEPDGAFSSSCLGGNSKINSDSSFSVPIKQESTKHSCSGTSFKGNPTVNPFPFMDGSYFSFMDDKDYYSLSGILGPPVPGFDGNCEGSGFPVGIKQEPDDGSYYPEASIPSSAIVGVNSGGQSFHYRIGAQGTISLSRSARDQSFQHLSSFPPVNTLVESWKSHGDLSSRRSDGYPVLEYIPENVSSSTLRSVSTGSSRPSKICLVCGDEASGCHYGVVTCGSCKVFFKRAVEGQHNYLCAGRNDCIIDKIRRKNCPACRLQKCLQAGMNLGARKSKKLGKLKGIHEEQPQQQQPPPPPPPPQSPEEGTTYIAPAKEPSVNTALVPQLSTISRALTPSPVMVLENIEPEIVYAGYDSSKPDTAENLLSTLNRLAGKQMIQVVKWAKVLPGFKNLPLEDQITLIQYSWMCLSSFALSWRSYKHTNSQFLYFAPDLVFNEEKMHQSAMYELCQGMHQISLQFVRLQLTFEEYTIMKVLLLLSTIPKDGLKSQAAFEEMRTNYIKELRKMVTKCPNNSGQSWQRFYQLTKLLDSMHDLVSDLLEFCFYTFRESHALKVEFPAMLVEIISDQLPKVESGNAKPLYFHRK

SEQ ID NO: 590 - protein, 1304 aa, Homo sapiens
MQLKIMPKKKRLSAGRVPLILFLCQMISALEVPLDPKLLEDLVQPPTITQQSPKDYIIDPRENIVIQCEAKGKPPPSFSWTRNGTHFDIDKDPLVTMKPGTGTLIINIMSEGKAETYEGVYQCTARNERGAAVSNNIVVRPSRSPLWTKEKLEPITLQSGQSLVLPCRPPIGLPPPIIFWMDNSFQRLPQSERVSQGLNGDLYFSNVLPEDTREDYICYARFNHTQTIQQKQPISVKVISVDELNDTIAANLSDTEFYGAKSSRERPPTFLTPEGNASNKEELRGNVLSLECIAEGLPTPIIYWAKEDGMLPKNRTVYKNFEKTLQIIHVSEADSGNYQCIAKNALGAIHHTISVRVKAAPYWITAPQNLVLSPGEDGTLICRANGNPKPRISWLTNGVPIEIAPDDPSRKIDGDTIIFSNVQERSSAVYQCNASNEYGYLLANAFVNVLAEPPRILTPANTLYQVIANRPALLDCAFFGSPLPTIEWFKGAKGSALHEDIYVLHENGTLEIPVAQKDSTGTYTCVARNKLGMAKNEVHLEIKDPTWIVKQPEYAVVQRGSMVSFECKVKHDHTLSLTVLWLKDNRELPSDERFTVDKDHLVVADVSDDDSGTYTCVANTTLDSVSASAVLSVVAPTPTPAPVYDVPNPPFDLELTDQLDKSVQLSWTPGDDNNSPITKFIIEYEDAMHKPGLWHHQTEVSGTQTTAQLKLSPYVNYSFRVMAVNSIGKSLPSEASEQYLTKASEPDKNPTAVEGLGSEPDNLVITWKPLNGFESNGPGLQYKVSWRQKDGDDEWTSVVVANVSKYIVSGTPTFVPYLIKVQALNDMGFAPEPAVVMGHSGEDLPMVAPGNVRVNVVNSTLAEVHWDPVPLKSIRGHLQGYRIYYWKTQSSSKRNRRHIEKKILTFQGSKTHGMLPGLEPFSHYTLNVRVVNGKGEGPASPDRVFNTPEGVPSAPSSLKIVNPTLDSLTLEWDPPSHPNGILTEYTLKYQPINSTHELGPLVDLKIPANKTRWTLKNLNFSTRYKFYFYAQTSAGSGSQITEEAVTTVDEAGILPPDVGAGKVQAVNPRISNLTAAAAETYANISWEYEGPEHVNFYVEYGVAGSKEEWRKEIVNGSRSFFGLKGLMPGTAYKVRVGAVGDSGFVSSEDVFETGPAMASRQVDIATQGWFIGLMCAVALLILILLIVCFIRRNKGGKYPVKEKEDAHADPEIQPMKEDDGTFGEYSDAEDHKPLKKGSRTPSDRTVKKEDSDDSLVDYGEGVNGQFNEDGSFIGQYSGKKEKEPAEGNESSEAPSPVNAMNSFV

SEQ ID NO: 591 - protein, 645 aa, Homo sapiens
MSERKEGRGKGKGKKKERGSGKKPESAAGSQSPALPPRLKEMKSQESAAGSKLVLRCETSSEYSSLRFKWFKNGNELNRKNKPQNIKIQKKPGKSELRINKASLADSGEYMCKVISKLGNDSASANITIVESNEIITGMPASTEGAYVSSESPIRISVSTEGANTSSSTSTSTTGTSHLVKCAEKEKTFCVNGGECFMVKDLSNPSRYLCKCPNEFTGDRCQNYVMASFYKHLGIEFMEAEELYQKRVLTITGICIALLVVGIMCVVAYCKTKKQRKKLHDRLRQSLRSERNNMMNIANGPHHPNPPPENVQLVNQYVSKNVISSEHIVEREAETSFSTSHYTSTAHHSTTVTQTPSHSWSNGHTESILSESHSVIVMSSVENSRHSSPTGGPRGRLNGTGGPRECNSFLRHARETPDSYRDSPHSERYVSAMTTPARMSPVDFHTPSSPKSPPSEMSPPVSSMTVSMPSMAVSPFMEEERPLLLVTPPRLREKKFDHHPQQFSSFHHNPAHDSNSLPASPLRIVEDEEYETTQEYEPAQEPVKKLANSRRAKRTKPNGHIANRLEVDSNTSSQSSNSESETEDERVGEDTPFLGIQNPLAASLEATPAFRLADSRTNPAGRFSTQEEIQARLSSVIANQDPIAV

SEQ ID NO: 592 - protein, 931 aa, Homo sapiens
MDMFPLTWVFLALYFSRHQVRGQPDPPCGGRLNSKDAGYITSPGYPQDYPSHQNCEWIVYAPEPNQKIVLNFNPHFEIEKHDCKYDFIEIRDGDSESADLLGKHCGNIAPPTIISSGSMLYIKFTSDYARQGAGFSLRYEIFKTGSEDCSKNFTSPNGTIESPGFPEKYPHNLDCTFTILAKPKMEIILQFLIFDLEHDPLQVGEGDCKYDWLDIWDGIPHVGPLIGKYCGTKTPSELRSSTGILSLTFHTDMAVAKDGFSARYYLVHQEPLENFQCNVPLGMESGRIANEQISASSTYSDGRWTPQQSRLHGDDNGWTPNLDSNKEYLQVDLRFLTMLTAIATQGAISRETQNGYYVKSYKLEVSTNGEDWMVYRHGKNHKVFQANNDATEVVLNKLHAPLLTRFVRIRPQTWHSGIALRLELFGCRVTDAPCSNMLGMLSGLIADSQISASSTQEYLWSPSAARLVSSRSGWFPRIPQAQPGEEWLQVDLGTPKTVKGVIIQGARGGDSITAVEARAFVRKFKVSYSLNGKDWEYIQDPRTQQPKLFEGNMHYDTPDIRRFDPIPAQYVRVYPERWSPAGIGMRLEVLGCDWTDSKPTVETLGPTVKSEETTTPYPTEEEATECGENCSFEDDKDLQLPSGFNCNFDFLEEPCGWMYDHAKWLRTTWASSSSPNDRTFPDDRNFLRLQSDSQREGQYARLISPPVHLPRSPVCMEFQYQATGGRGVALQVVREASQESKLLWVIREDQGGEWKHGRIILPSYDMEYQIVFEGVIGKGRSGEIAIDDIRISTDVPLENCMEPISAFAGENFKVDIPEIHEREGYEDEIDDEYEVDWSNSSSATSGSGAPSTDKEKSWLYTLDPILITIIAMSSLGVLLGATCAGLLLYCTCSYSGLSSRSCTTLENYNFELYDGLKHKVKMNHQKCCSEA

SEQ ID NO: 593 - protein, 1547 aa, Homo sapiens
MGTALLQRGGCFLLCLSLLLLGCWAELGSGLEFPGAEGQWTRFPKWNACCESEMSFQLKTRSARGLVLYFDDEGFCDFLELILTRGGRLQLSFSIFCAEPATLLADTPVNDGAWHSVRIRRQFRNTTLFIDQVEAKWVEVKSKRRDMTVFSGLFVGGLPPELRAAALKLTLASVREREPFKGWIRDVRVNSSQVLPVDSGEVKLDDEPPNSGGGSPCEAGEEGEGGVCLNGGVCSVVDDQAVCDCSRTGFRGKDCSQEIKFGLQCVLPVLLHDNDQGKYCCINTAKPLTEKDNNVEGLAHLMMGDQGKSKGKEEYIATFKGSEYFCYDLSQNPIQSSSDEITLSFKTLQRNGLMLHTGKSADYVNLALKNGAVSLVINLGSGAFEALVEPVNGKFNDNAWHDVKVTRNLRQHSGIGHAMVNKLHCSVTISVDGILTTTGYTQEDYTMLGSDDFFYVGGSPSTADLPGSPVSNNFMGCLKEVVYKNNDVRLELSRLAKQGDPKMKIHGVVAFKCENVATLDPITFETPESFISLPKWNAKKTGSISFDFRTTEPNGLILFSHGKPRHQKDAKHPQMIKVDFFAIEMLDGHLYLLLDMGSGTIKIKALLKKVNDGEWYHVDFQRDGRSGTISVNTLRTPYTAPGESEILDLDDELYLGGLPENKAGLVFPTEVWTALLNYGYVGCIRDLFIDGQSKDIRQMAEVQSTAGVKPSCSKETAKPCLSNPCKNNGMCRDGWNRYVCDCSGTGYLGRSCEREATVLSYDGSMFMKIQLPVVMHTEAEDVSLRFRSQRAYGILMATTSRDSADTLRLELDAGRVKLTVNLDCIRINCNSSKGPETLFAGYNLNDNEWHTVRVVRRGKSLKLTVDDQQAMTGQMAGDHTRLEFHNIETGIITERRYLSSVPSNFIGHLQSLTFNGMAYIDLCKNGDIDYCELNARFGFRNIIADPVTFKTKSSYVALATLQAYTSMHLFFQFKTTSLDGLILYNSGDGNDFIVVELVKGYLHYVFDLGNGANLIKGSSNKPLNDNQWHNVMISRDTSNLHTVKIDTKITTQITAGARNLDLKSDLYIGGVAKETYKSLPKLVHAKEGFQGCLASVDLNGRLPDLISDALFCNGQIERGCEGPSTTCQEDSCSNQGVCLQQWDGFSCDCSMTSFSGPLCNDPGTTYIFSKGGGQITYKWPPNDRPSTRADRLAIGFSTVQKEAVLVRVDSSSGLGDYLELHIHQGKIGVKFNVGTDDIAIEESNAIINDGKYHVVRFTRSGGNATLQVDSWPVIERYPAGNNDNERLAIARQRIPYRLGRVVDEWLLDKGRQLTIFNSQATIIIGGKEQGQPFQGQLSGLYYNGLKVLNMAAENDANIAIVGNVRLVGEVPSSMTTESTATAMQSEMSTSIMETTTTLATSTARRGKPPTKEPISQTTDDILVASAECPSDDEDIDPCEPSSGGLANPTRAGGREPYPGSAEVIRESSSTTGMVVGIVAAAALCILILLYAMYKYRNRDEGSYHVDESRNYISNSAQSNGAVVKEKQPSSAKSSNKNKKNKDKEYYV

SEQ ID NO: 594 - protein, 1712 aa, Homo sapiens
MASGSRWRPTPPPLLLLLLLALAARADGLEFGGGPGQWARYARWAGAASSGELSFSLRTNATRALLLYLDDGGDCDFLELLLVDGRLRLRFTLSCAEPATLQLDTPVADDRWHMVLLTRDARRTALAVDGEARAAEVRSKRREMQVASDLFVGGIPPDVRLSALTLSTVKYEPPFRGLLANLKLGERPPALLGSQGLRGATADPLCAPARNPCANGGLCTVLAPGEVGCDCSHTGFGGKFCSEEEHPMEGPAHLTLNSEVGSLLFSEGGAGRGGAGDVHQPTKGKEEFVATFKGNEFFCYDLSHNPIQSSTDEITLAFRTLQRNGLMLHTGKSADYVNLSLKSGAVWLVINLGSGAFEALVEPVNGKFNDNAWHDVRVTRNLRQHAGIGHAMVNKLHYLVTISVDGILTTTGYTQEDYTMLGSDDFFYIGGSPNTADLPGSPVSNNFMGCLKDVVYKNNDFKLELSRLAKEGDPKMKLQGDLSFRCEDVAALDPVTFESPEAFVALPRWSAKRTGSISLDFRTTEPNGLLLFSQGRRAGGGAGSHSSAQRADYFAMELLDGHLYLLLDMGSGGIKLRASSRKVNDGEWCHVDFQRDGRKGSISVNSRSTPFLATGDSEILDLESELYLGGLPEGGRVDLPLPPEVWTAALRAGYVGCVRDLFIDGRSRDLRGLAEAQGAVGVAPFCSRETLKQCASAPCRNGGVCREGWNRFICDCIGTGFLGRVCEREATVLSYDGSMYMKIMLPNAMHTEAEDVSLRFMSQRAYGLMMATTSRESADTLRLELDGGQMKLTVNLDCLRVGCAPSKGPETLFAGHKLNDNEWHTVRVVRRGKSLQLSVDNVTVEGQMAGAHMRLEFHNIETGIMTERRFISVVPSNFIGHLSGLVFNGQPYMDQCKDGDITYCELNARFGLRAIVADPVTFKSRSSYLALATLQAYASMHLFFQFKTTAPDGLLLFNSGNGNDFIVIELVKGYIHYVFDLGNGPSLMKGNSDKPVNDNQWHNVVVSRDPGNVHTLKIDSRTVTQHSNGARNLDLKGELYIGGLSKNMFSNLPKLVASRDGFQGCLASVDLNGRLPDLIADALHRIGQVERGCDGPSTTCTEESCANQGVCLQQWDGFTCDCTMTSYGGPVCNDPGTTYIFGKGGALITYTWPPNDRPSTRMDRLAVGFSTHQRSAVLVRVDSASGLGDYLQLHIDQGTVGVIFNVGTDDITIDEPNAIVSDGKYHVVRFTRSGGNATLQVDSWPVNERYPAGNFDNERLAIARQRIPYRLGRVVDEWLLDKGRQLTIFNSQAAIKIGGRDQGRPFQGQVSGLYYNGLKVLALAAESDPNVRTEGHLRLVGEGPSVLLSAETTATTLLADMATTIMETTTTMATTTTRRGRSPTLRDSTTQNTDDLLVASAECPSDDEDLEECEPSTGGELILPIITEDSLDPPPVATRSPFVPPPPTFYPFLTGVGATQDTLPPPAARRPPSGGPCQAERDDSDCEEPIEASGFASGEVFDSSLPPTDDEDFYTTFPLVTDRTTLLSPRKPAPRPNLRTDGATGAPGVLFAPSAPAPNLPAGKMNHRDPLQPLLENPPLGPGAPTSFEPRRPPPLRPGVTSAPGFPHLPTANPTGPGERGPPGAVEVIRESSSTTGMVVGIVAAAALCILILLYAMYKYRNRDEGSYQVDQSRNYISNSAQSNGAVVKEKAPAAPKTPSKAKKNKDKEYYV

SEQ ID NO: 595 - protein, 1061 aa, Homo sapiens
MLGSDDFFYVGGSPSTADLPGSPVSNNFMGCLKEVVYKNNDIRLELSRLARIADTKMKIYGEVVFKCENVATLDPINFETPEAYISLPKWNTKRMGSISFDFRTTEPNGLILFTHGKPQERKDARSQKNTKVDFFAVELLDGNLYLLLDMGSGTIKVKATQKKANDGEWYHVDIQRDGRSGTISVNSRRTPFTASGESEILDLEGDMYLGGLPENRAGLILPTELWTAMLNYGYVGCIRDLFIDGRSKNIRQLAEMQNAAGVKSSCSRMSAKQCDSYPCKNNAVCKDGWNRFICDCTGTGYWGRTCEREASILSYDGSMYMKIIMPMVMHTEAEDVSFRFMSQRAYGLLVATTSRDSADTLRLELDGGRVKLMVNLDCIRINCNSSKGPETLYAGQKLNDNEWHTVRVVRRGKSLKLTVDDDVAEGTMVGDHTRLEFHNIETGIMTEKRYISVVPSSFIGHLQSLMFNGLLYIDLCKNGDIDYCELKARFGLRNIIADPVTFKTKSSYLSLATLQAYTSMHLFFQFKTTSPDGFILFNSGDGNDFIAVELVKGYIHYVFDLGNGPNVIKGNSDRPLNDNQWHNVVITRDNSNTHSLKVDTKVVTQVINGAKNLDLKGDLYMAGLAQGMYSNLPKLVASRDGFQGCLASVDLNGRLPDLINDALHRSGQIERGCEGPSTTCQEDSCANQGVCMQQWEGFTCDCSMTSYSGNQCNDPGATYIFGKSGGLILYTWPANDRPSTRSDRLAVGFSTTVKDGILVRIDSAPGLGDFLQLHIEQGKIGVVFNIGTVDISIKEERTPVNDGKYHVVRFTRNGGNATLQVDNWPVNEHYPTGRQLTIFNTQAQIAIGGKDKGRLFQGQLSGLYYDGLKVLNMAAENNPNIKINGSVRLVGEVPSILGTTQTTSMPPEMSTTVMETTTTMATTTTRKNRSTASIQPTSDDLVSSAECSSDDEDFVECEPSTANPTEPGIRRVPGASEVIRESSSTTGMVVGIVAAAALCILILLYAMYKYRNRDEGSYQVDETRNYISNSAQSNGTLMKEKQQSSKSGHKKQKNKDREYYV

SEQ ID NO: 596 - protein, 2696 aa, Homo sapiens
MDQTCELPRRNCLLPFSNPVNLDAPEDKDSPFGNGQSNFSEPLNGCTMQLSTVSGTSQNAYGQDSPSCYIPLRRLQDLASMINVEYLNGSADGSESFQDPEKSDSRAQTPIVCTSLSPGGPTALAMKQEPSCNNSPELQVKVTKTIKNGFLHFENFTCVDDADVDSEMDPEQPVTEDESIEEIFEETQTNATCNYETKSENGVKVAMGSEQDSTPESRHGAVKSPFLPLAPQTETQKNKQRNEVDGSNEKAALLPAPFSLGDTNITIEEQLNSINLSFQDDPDSSTSTLGNMLELPGTSSSSTSQELPFCQPKKKSTPLKYEVGDLIWAKFKRRPWWPCRICSDPLINTHSKMKVSNRRPYRQYYVEAFGDPSERAWVAGKAIVMFEGRHQFEELPVLRRRGKQKEKGYRHKVPQKILSKWEASVGLAEQYDVPKGSKNRKCIPGSIKLDSEEDMPFEDCTNDPESEHDLLLNGCLKSLAFDSEHSADEKEKPCAKSRARKSSDNPKRTSVKKGHIQFEAHKDERRGKIPENLGLNFISGDISDTQASNELSRIANSLTGSNTAPGSFLFSSCGKNTAKKEFETSNGDSLLGLPEGALISKCSREKNKPQRSLVCGSKVKLCYIGAGDEEKRSDSISICTTSDDGSSDLDPIEHSSESDNSVLEIPDAFDRTENMLSMQKNEKIKYSRFAATNTRVKAKQKPLISNSHTDHLMGCTKSAEPGTETSQVNLSDLKASTLVHKPQSDFTNDALSPKFNLSSSISSENSLIKGGAANQALLHSKSKQPKFRSIKCKHKENPVMAEPPVINEECSLKCCSSDTKGSPLASISKSGKVDGLKLLNNMHEKTRDSSDIETAVVKHVLSELKELSYRSLGEDVSDSGTSKPSKPLLFSSASSQNHIPIEPDYKFSTLLMMLKDMHDSKTKEQRLMTAQNLVSYRSPGRGDCSTNSPVGVSKVLVSGGSTHNSEKKGDGTQNSANPSPSGGDSALSGELSASLPGLLSDKRDLPASGKSRSDCVTRRNCGRSKPSSKLRDAFSAQMVKNTVNRKALKTERKRKLNQLPSVTLDAVLQGDRERGGSLRGGAEDPSKEDPLQIMGHLTSEDGDHFSDVHFDSKVKQSDPGKISEKGLSFENGKGPELDSVMNSENDELNGVNQVVPKKRWQRLNQRRTKPRKRMNRFKEKENSECAFRVLLPSDPVQEGRDEFPEHRTPSASILEEPLTEQNHADCLDSAGPRLNVCDKSSASIGDMEKEPGIPSLTPQAELPEPAVRSEKKRLRKPSKWLLEYTEEYDQIFAPKKKQKKVQEQVHKVSSRCEEESLLARGRSSAQNKQVDENSLISTKEEPPVLEREAPFLEGPLAQSELGGGHAELPQLTLSVPVAPEVSPRPALESEELLVKTPGNYESKRQRKPTKKLLESNDLDPGFMPKKGDLGLSKKCYEAGHLENGITESCATSYSKDFGGGTTKIFDKPRKRKRQRHAAAKMQCKKVKNDDSSKEIPGSEGELMPHRTATSPKETVEEGVEHDPGMPASKKMQGERGGGAALKENVCQNCEKLGELLLCEAQCCGAFHLECLGLTEMPRGKFICNECRTGIHTCFVCKQSGEDVKRCLLPLCGKFYHEECVQKYPPTVMQNKGFRCSLHICITCHAANPANVSASKGRLMRCVRCPVAYHANDFCLAAGSKILASNSIICPNHFTPRRGCRNHEHVNVSWCFVCSEGGSLLCCDSCPAAFHRECLNIDIPEGNWYCNDCKAGKKPHYREIVWVKVGRYRWWPAEICHPRAVPSNIDKMRHDVGEFPVLFFGSNDYLWTHQARVFPYMEGDVSSKDKMGKGVDGTYKKALQEAAARFEELKAQKELRQLQEDRKNDKKPPPYKHIKVNRPIGRVQIFTADLSEIPRCNCKATDENPCGIDSECINRMLLYECHPTVCPAGGRCQNQCFSKRQYPEVEIFRTLQRGWGLRTKTDIKKGEFVNEYVGELIDEEECRARIRYAQEHDITNFYMLTLDKDRIIDAGPKGNYARFMNHCCQPNCETQKWSVNGDTRVGLFALSDIKAGTELTFNYNLECLGNGKTVCKCGAPNCSGFLGVRPKNQPIATEEKSKKFKKKQQGKRRTQGEITKEREDECFSCGDAGQLVSCKKPGCPKVYHADCLNLTKRPAGKWECPWHQCDICGKEAASFCEMCPSSFCKQHREGMLFISKLDGRLSCTEHDPCGPNPLEPGEIREYVPPPVPLPPGPSTHLAEQSTGMAAQAPKMSDKPPADTNQMLSLSKKALAGTCQRPLLPERPLERTDSRPQPLDKVRDLAGSGTKSQSLVSSQRPLDRPPAVAGPRPQLSDKPSPVTSPSSSPSVRSQPLERPLGTADPRLDKSIGAASPRPQSLEKTSVPTGLRLPPPDRLLITSSPKPQTSDRPTDKPHASLSQRLPPPEKVLSAVVQTLVAKEKALRPVDQNTQSKNRAALVMDLIDLTPRQKERAASPHQVTPQADEKMPVLESSSWPASKGLGHMPRAVEKGCVSDPLQTSGKAAAPSEDPWQAVKSLTQARLLSQPPAKAFLYEPTTQASGRASAGAEQTPGPLSQSPGLVKQAKQMVGGQQLPALAAKSGQSFRSLGKAPASLPTEEKKLVTTEQSPWALGKASSRAGLWPIVAGQTLAQSCWSAGSTQTLAQTCWSLGRGQDPKPEQNTLPALNQAPSSHKCAESEQK

SEQ ID NO: 597 - protein, 539 aa, Homo sapiens
MYLSRFLSIHALWVTVSSVMQPYPLVWGHYDLCKTQIYTEEGKVWDYMACQPESTDMTKYLKVKLDPPDITCGDPPETFCAMGNPYMCNNECDASTPELAHPPELMFDFEGRHPSTFWQSATWKEYPKPLQVNITLSWSKTIELTDNIVITFESGRPDQMILEKSLDYGRTWQPYQYYATDCLDAFHMDPKSVKDLSQHTVLEIICTEEYSTGYTTNSKIIHFEIKDRFAFFAGPRLRNMASLYGQLDTTKKLRDFFTVTDLRIRLLRPAVGEIFVDELHLARYFYAISDIKVRGRCKCNLHATVCVYDNSKLTCECEHNTTGPDCGKCKKNYQGRPWSPGSYLPIPKGTANTCIPSISSIGNCECFGHSNRCSYIDLLNTVICVSCKHNTRGQHCELCRLGYFRNASAQLDDENVCIECYCNPLGSIHDRCNGSGFCECKTGTTGPKCDECLPGNSWHYGCQPNVCDNELLHCQNGGTCHNNVRCLCPAAYTGILCEKLRCEEAGSCGSDSGQGAPPHGSPALLLLTTLLGTASPLVF

SEQ ID NO: 598 - protein, 796 aa, Homo sapiens
MLRGGRRGQLGWHSWAAGPGSLLAWLILASAGAAPCPDACCPHGSSGLRCTRDGALDSLHHLPGAENLTELYIENQQHLQHLELRDLRGLGELRNLTIVKSGLRFVAPDAFHFTPRLSRLNLSFNALESLSWKTVQGLSLQELVLSGNPLHCSCALRWLQRWEEEGLGGVPEQKLQCHGQGPLAHMPNASCGVPTLKVQVPNASVDVGDDVLLRCQVEGRGLEQAGWILTELEQSATVMKSGGLPSLGLTLANVTSDLNRKNVTCWAENDVGRAEVSVQVNVSFPASVQLHTAVEMHHWCIPFSVDGQPAPSLRWLFNGSVLNETSFIFTEFLEPAANETVRHGCLRLNQPTHVNNGNYTLLAANPFGQASASIMAAFMDNPFEFNPEDPIPVSFSPVDTNSTSGDPVEKKDETPFGVSVAVGLAVFACLFLSTLLLVLNKCGRRNKFGINRPAVLAPEDGLAMSLHFMTLGGSSLSPTEGKGSGLQGHIIENPQYFSDACVHHIKRRDIVLKWELGEGAFGKVFLAECHNLLPEQDKMLVAVKALKEASESARQDFQREAELLTMLQHQHIVRFFGVCTEGRPLLMVFEYMRHGDLNRFLRSHGPDAKLLAGGEDVAPGPLGLGQLLAVASQVAAGMVYLAGLHFVHRDLATRNCLVGQGLVVKIGDFGMSRDIYSTDYYRVGGRTMLPIRWMPPESILYRKFTTESDVWSFGVVLWEIFTYGKQPWYQLSNTEAIDCITQGRELERPRACPPEVYAIMRGCWQREPQQRHSIKDVHARLQALAQAPPVYLDVLG

SEQ ID NO: 599 - protein, 839 aa, Homo sapiens
MDVSLCPAKCSFWRIFLLGSVWLDYVGSVLACPANCVCSKTEINCRRPDDGNLFPLLEGQDSGNSNGNASINITDISRNITSIHIENWRSLHTLNAVDMELYTGLQKLTIKNSGLRSIQPRAFAKNPHLRYINLSSNRLTTLSWQLFQTLSLRELQLEQNFFNCSCDIRWMQLWQEQGEAKLNSQNLYCINADGSQLPLFRMNISQCDLPEISVSHVNLTVREGDNAVITCNGSGSPLPDVDWIVTGLQSINTHQTNLNWTNVHAINLTLVNVTSEDNGFTLTCIAENVVGMSNASVALTVYYPPRVVSLEEPELRLEHCIEFVVRGNPPPTLHWLHNGQPLRESKIIHVEYYQEGEISEGCLLFNKPTHYNNGNYTLIAKNPLGTANQTINGHFLKEPFPESTDNFILFDEVSPTPPITVTHKPEEDTFGVSIAVGLAAFACVLLVVLFVMINKYGRRSKFGMKGPVAVISGEEDSASPLHHINHGITTPSSLDAGPDTVVIGMTRIPVIENPQYFRQGHNCHKPDTYVQHIKRRDIVLKRELGEGAFGKVFLAECYNLSPTKDKMLVAVKALKDPTLAARKDFQREAELLTNLQHEHIVKFYGVCGDGDPLIMVFEYMKHGDLNKFLRAHGPDAMILVDGQPRQAKGELGLSQMLHIASQIASGMVYLASQHFVHRDLATRNCLVGANLLVKIGDFGMSRDVYSTDYYRLFNPSGNDFCIWCEVGGHTMLPIRWMPPESIMYRKFTTESDVWSFGVILWEIFTYGKQPWFQLSNTEVIECITQGRVLERPRVCPKEVYDVMLGCWQREPQQRLNIKEIYKILHALGKATPIYLDILG

SEQ ID NO: 600 - protein, 661 aa, Homo sapiens
MEGAAAPVAGDRPDLGLGAPGSPREAVAGATAALEPRKPHGVKRHHHKHNLKHRYELQETLGKGTYGKVKRATERFSGRVVAIKSIRKDKIKDEQDMVHIRREIEIMSSLNHPHIISIYEVFENKDKIVIIMEYASKGELYDYISERRRLSERETRHFFRQIVSAVHYCHKNGVVHRDLKLENILLDDNCNIKIADFGLSNLYQKDKFLQTFCGSPLYASPEIVNGRPYRGPEVDSWALGVLLYTLVYGTMPFDGFDHKNLIRQISSGEYREPTQPSDARGLIRWMLMVNPDRRATIEDIANHWWVNWGYKSSVCDCDALHDSESPLLARIIDWHHRSTGLQADTEAKMKGLAKPTTSEVMLERQRSLKKSKKENDFAQSGQDAVPESPSKLSSKRPKGILKKRSNSEHRSHSTGFIEGVVGPALPSTFKMEQDLCRTGVLLPSSPEAEVPGKLSPKQSATMPKKGILKKTQQRESGYYSSPERSESSELLDSNDVMGSSIPSPSPPDPARVTSHSLSCRRKGILKHSSKYSAGTMDPALVSPEMPTLESLSEPGVPAEGLSRSYSRPSSVISDDSVLSSDSFDLLDLQENRPARQRIRSCVSAENFLQIQDFEGLQNRPRPQYLKRYRNRLADSSFSLLTDMDDVTQVYKQALEICSKLN

SEQ ID NO: 601 - protein, 1156 aa, Homo sapiens
MFPAAPSPRTPGTGSRRGPLAGLGPGSTPRTASRKGLPLGSAVSSPVLFSPVGRRSSLSSRGTPTRMFPHHSITESVNYDVKTFGSSLPVKVMEALTLAEVDDQLTINIDEGGWACLVCKEKLIIWKIALSPITKLSVCKELQLPPSDFHWSADLVALSYSSPSGEAHSTQAVAVMVATREGSIRYWPSLAGEDTYTEAFVDSGGDKTYSFLTAVQGGSFILSSSGSQLIRLIPESSGKIHQHILPQGQGMLSGIGRKVSSLFGILSPSSDLTLSSVLWDRERSSFYSLTSSNISKWELDDSSEKHAYSWDINRALKENITDAIWGSESNYEAIKEGVNIRYLDLKQNCDGLVILAAAWHSADNPCLIYYSLITIEDNGCQMSDAVTVEVTQYNPPFQSEDLILCQLTVPNFSNQTAYLYNESAVYVCSTGTGKFSLPQEKIVFNAQGDSVLGAGACGGVPIIFSRNSGLVSITSRENVSILAEDLEGSLASSVAGPNSESMIFETTTKNETIAQEDKIKLLKAAFLQYCRKDLGHAQMVVDELFSSHSDLDSDSELDRAVTQISVDLMDDYPASDPRWAESVPEEAPGFSNTSLIILHQLEDKMKAHSFLMDFIHQVGLFGRLGSFPVRGTPMATRLLLCEHAEKLSAAIVLKNHHSRLSDLVNTAILIALNKREYEIPSNLTPADVFFREVSQVDTICECLLEHEEQVLRDAPMDSIEWAEVVINVNNILKDMLQAASHYRQNRNSLYRREESLEKEPEYVPWTATSGPGGIRTVIIRQHEIVLKVAYPQADSNLRNIVTEQLVALIDCFLDGYVSQLKSVDKSSNRERYDNLEMEYLQKRSDLLSPLLSLGQYLWAASLAEKYCDFDILVQMCEQTDNQSRLQRYMTQFADQNFSDFLFRWYLEKGKRGKLLSQPISQHGQLANFLQAHEHLSWLHEINSQELEKAHATLLGLANMETRYFAKKKTLLGLSKLAALASDFSEDMLQEKIEEMAEQERFLLHQETLPEQLLAEKQLNLSAMPVLTAPQLIGLYICEENRRANEYDFKKALDLLEYIDEEEDININDLKLEILCKALQRDNWSSSDGKDDPIEVSKDSIFVKILQKLLKDGIQLSEYLPEVKDLLQADQLGSLKSNPYFEFVLKANYEYYVQGQI

SEQ ID NO: 602 - protein, 365 aa, Homo sapiens
MRRNTQDENMRKWFKVTIPYGIKYDKAWLMNSIQSNCSVPFTPVDFHYIRNRACFFVQVASAASALKDVSYKIYDDENQKICIFVSHFTAPYSVKNKLKPGQMEMLKLTMNKRYNVSQQALDLQNLRFDPDLMGRDIDIILNRRNCMAATLKITERNFPELLSLNLCNNKLYQLDGLSDITEKAPKVKTLNLSKNKLESAWELGKVKGLKLEELWLEGNPLCSTFSDQSAYVSAIRDCFPKLLRLDGRELSAPVIVDIDSSETMKPCKENFTGSETLKHLVLQFLQQSNLCKYFKDSRNIKILKDPYLQRKLLKHTKCPRNVDSLSALPETQHDFTSILVDMWYQTVNTCFLPRAGPESQSLRPL

SEQ ID NO: 603 - protein, 271 aa, Homo sapiens
MQAACWYVLFLLQPTVYLVTCANLTNGGKSELLKSGSSKSTLKHIWTESSKDLSISRLLSQTFRGKENDTDLDLRYDTPEPYSEQDLWDWLRNSTDLQEPRPRAKRRPIVKTGKFKKMFGWGDFHSNIKTVKLNLLITGKIVDHGNGTFSVYFRHNSTGQGNVSVSLVPPTKIVEFDLAQQTVIDAKDSKSFNCRIEYEKVDKATKNTLCNYDPSKTCYQEQTQSHVSWLCSKPFKVICIYISFYSTDYKLVQKVCPDYNYHSDTPYFPSG

SEQ ID NO: 604 - protein, 901 aa, Homo sapiens
MEPPLPVGAQPLATVEGMEMKGPLREPCALTLAQRNGQYELIIQLHEKEQHVQDIIPINSHFRCVQEAEETLLIDIASNSGCKIRVQGDWIRERRFEIPDEEHCLKFLSAVLAAQKAQSQLLVPEQKDSSSWYQKLDTKDKPSVFSGLLGFEDNFSSMNLDKKINSQNQPTGIHREPPPPPFSVNKMLPREKEASNKEQPKVTNTMRKLFVPNTQSGQREGLIKHILAKREKEYVNIQTFRFFVGTWNVNGQSPDSGLEPWLNCDPNPPDIYCIGFQELDLSTEAFFYFESVKEQEWSMAVERGLHSKAKYKKVQLVRLVGMMLLIFARKDQCRYIRDIATETVGTGIMGKMGNKGGVAVRFVFHNTTFCIVNSHLAAHVEDFERRNQDYKDICARMSFVVPNQTLPQLNIMKHEVVIWLGDLNYRLCMPDANEVKSLINKKDLQRLLKFDQLNIQRTQKKAFVDFNEGEIKFIPTYKYDSKTDRWDSSGKCRVPAWCDRILWRGTNVNQLNYRSHMELKTSDHKPVSALFHIGVKVVDERRYRKVFEDSVRIMDRMENDFLPSLELSRREFVFENVKFRQLQKEKFQISNNGQVPCHFSFIPKLNDSQYCKPWLRAEPFEGYLEPNETVDISLDVYVSKDSVTILNSGEDKIEDILVLHLDRGKDYFLTISGNYLPSCFGTSLEALCRMKRPIREVPVTKLIDLEEDSFLEKEKSLLQMVPLDEGASERPLQVPKEIWLLVDHLFKYACHQEDLFQTPGMQEELQQIIDCLDTSIPETIPGSNHSVAEALLIFLEALPEPVICYELYQRCLDSAYDPRICRQVISQLPRCHRNVFRYLMAFLRELLKFSEYNSVNANMIATLFTSLLLRPPPNLMARQTPSDRQRAIQFLLGFLLGSEED

SEQ ID NO: 605 - protein, 289 aa, Homo sapiens
MGTLSCDSTPRLATAPLGRRVTEGQIPETGLRKSCGTATLENGSGPGLYVLPSTVGFINHDCTRVASPAYSLVRRPSEAPPQDTSPGPIYFLDPKVTRFGRSCTPAYSMQGRAKSRGPEVTPGPGAYSPEKVPPVRHRTPPAFTLGCRLPLKPLDTSAPAPNAYTMPPLWGSQIFTKPSSPSYTVVGRTPPARPPQDPAEIPGPGQYDSPDANTYRQRLPAFTMLGRPRAPRPLEETPGPGAHCPEQVTVNKARAPAFSMGIRHSKRASTMAATTPSRPAGHRLPGRCC

SEQ ID NO: 606 - protein, 1046 aa, Homo sapiens
MASSVGNVADSTEPTKRMLSFQGLAELAHREYQAGDFEAAERHCMQLWRQEPDNTGVLLLLSSIHFQCRRLDRSAHFSTLAIKQNPLLAEAYSNLGNVYKERGQLQEAIEHYRHALRLKPDFIDGYINLAAALVAAGDMEGAVQAYVSALQYNPDLYCVRSDLGNLLKALGRLEEAKACYLKAIETQPNFAVAWSNLGCVFNAQGEIWLAIHHFEKAVTLDPNFLDAYINLGNVLKEARIFDRAVAAYLRALSLSPNHAVVHGNLACVYYEQGLIDLAIDTYRRAIELQPHFPDAYCNLANALKEKGSVAEAEDCYNTALRLCPTHADSLNNLANIKREQGNIEEAVRLYRKALEVFPEFAAAHSNLASVLQQQGKLQEALMHYKEAIRISPTFADAYSNMGNTLKEMQDVQGALQCYTRAIQINPAFADAHSNLASIHKDSGNIPEAIASYRTALKLKPDFPDAYCNLAHCLQIVCDWTDYDERMKKLVSIVADQLEKNRLPSVHPHHSMLYPLSHGFRKAIAERHGNLCLDKINVLHKPPYEHPKDLKLSDGRLRVGYVSSDFGNHPTSHLMQSIPGMHNPDKFEVFCYALSPDDGTNFRVKVMAEANHFIDLSQIPCNGKAADRIHQDGIHILVNMNGYTKGARNELFALRPAPIQAMWLGYPGTSGALFMDYIITDQETSPAEVAEQYSEKLAYMPHTFFIGDHANMFPHLKKKAVIDFKSNGHIYDNRIVLNGIDLKAFLDSLPDVKIVKMKCPDGGDNADSSNTALNMPVIPMNTIAEAVIEMINRGQIQITINGFSISNGLATTQINNKAATGEEVPRTIIVTTRSQYGLPEDAIVYCNFNQLYKIDPSTLQMWANILKRVPNSVLWLLRFPAVGEPNIQQYAQNMGLPQNRIIFSPVAPKEEHVRRGQLADVCLDTPLCNGHTTGMDVLWAGTPMVTMPGETLASRVAASQLTCLGCLELIAKNRQEYEDIAVKLGTDLEYLKKVRGKVWKQRISSPLFNTKQYTMELERLYLQMWEHYAAGNKPDHMIKPVEVTESA

SEQ ID NO: 607 - protein, 802 aa, Homo sapiens
MGHPPLEFSDCYLDSPDFRERLKCYEQELERTNKFIKDVIKDGNALISAMRNYSSAVQKFSQTLQSFQFDFIGDTLTDDEINIAESFKEFAELLNEVENERMMMVHNASDLLIKPLENFRKEQIGFTKERKKKFEKDGERFYSLLDRHLHLSSKKKESQLQEADLQVDKERHNFFESSLDYVYQIQEVQESKKFNIVEPVLAFLHSLFISNSLTVELTQDFLPYKQQLQLSLQNTRNHFSSTREEMEELKKRMKEAPQTCKLPGQPTIEGYLYTQEKWALGISWVKYYCQYEKETKTLTMTPMEQKPGAKQGPLDLTLKYCVRRKTESIDKRFCFDIETNERPGTITLQALSEANRRLWMEAMDGKEPIYHSPITKQQEMELNEVGFKFVRKCINIIETKGIKTEGLYRTVGSNIQVQKLLNAFFDPKCPGDVDFHNSDWDIKTITSSLKFYLRNLSEPVMTYRLHKELVSAAKSDNLDYRLGAIHSLVYKLPEKNREMLELLIRHLVNVCEHSKENLMTPSNMGVIFGPTLMRAQEDTVAAMMNIKFQNIVVEILIEHFGKIYLGPPEESAAPPVPPPRVTARRHKPITISKRLLRERTVFYTSSLDESEDEIQHQTPNGTITSSIEPPKPPQHPKLPIQRSGETDPGRKSPSRPILDGKLEPCPEVDVGKLVSRLQDGGTKITPKATNGPMPGSGPTKTPSFHIKRPAPRPLAHHKEGDADSFSKVRPPGEKPTIIRPPVRPPDPPCRAATPQKPEPKPDIVAGNAGEITSSVVASRTRFFETASRKTGSSQGRLPGDES

SEQ ID NO: 608 - protein, 493 aa, Homo sapiens
MCLHRRVPSEETYSLDRFAQNPPLFPPPSLPASESRMAHAPLLQRCGAARTGFCKKQQELWQRRKEAAEALGTRKVSVLLATSHSGARPAVSTMDSSAAPTNASNCTDALAYSSCSPAPSPGSWVNLSHLDGNLSDPCGPNRTDLGGRDSLCPPTGSPSMITAITIMALYSIVCVVGLFGNFLVMYVIVRYTKMKTATNIYIFNLALADALATSTLPFQSVNYLMGTWPFGTILCKIVISIDYYNMFTSIFTLCTMSVDRYIAVCHPVKALDFRTPRNAKIINVCNWILSSAIGLPVMFMATTKYRQGSIDCTLTFSHPTWYWENLLKICVFIFAFIMPVLIITVCYGLMILRLKSVRMLSGSKEKDRNLRRITRMVLVVVAVFIVCWTPIHIYVIIKALVTIPETTFQTVSWHFCIALGYTNSCLNPVLYAFLDENFKRCFREFCIPTSSNIEQQNSTRIRQNTRDHPSTANTVDRTNHQLENLEAETAPLP

SEQ ID NO: 609 - protein, 314 aa, Homo sapiens
MEKRNLTVVREFVLLGLPSSAEQQHLLSVLFLCMYLATTLGNMLIIATIGFDSHLHSPMYFFLSNLAFVDICFTSTTVPQMVVNILTGTKTISFAGCLTQLFFFVSFVNMDSLLLCVMAYDRYVAICHPLHYTARMNLCLCVQLVAGLWLVTYLHALLHTVLIAQLSFCASNIIHHFFCDLNPLLQLSCSDVSFNVMIIFAVGGLLALTPLVCILVSYGLIFSTVLKITSTQGKQRAVSTCSCHLSVVVLFYGTAIAVYFSPSSPHMPESDTLSTIMYSMVAPMLNPFIYTLRNRDMKRGLQKMLLKCTVFQQQ

SEQ ID NO: 610 - protein, 311 aa, Homo sapiens
MVWENQTFNSIFILLGIFNHSPTHTFLFSLVLGIFSLALMENISMVLLIYIEKQLHTPMYFLLSQLSLMDLMLICTTLPKMIFSYLSGKKSISLAGCGTQIFFYVSLLGAECFLLAVMAYDRYVAICHPLQYTILMNPKLCVFMTVASWTLGSLDGIIVLAAVLSFSYCSSLEIHHFFCDVAALLPLSCTETSAFERLLVICCVVMLIFPVSVIILSYSHVLRAVIHMGSGESRRKAFTTCSSHLSVVGLYYGAAMFMYMRPASKHTPDQDKMVSAFYTILTPMLNPLIYSLRNKEVFRALQKVLKKRKLI

SEQ ID NO: 611 - protein, 312 aa, Homo sapiens
MRLANQTLGGDFFLLGIFSQISHPGRLCLLIFSIFLMAVSWNITLILLIHIDSSLHTPMYFFINQLSLIDLTYISVTVPKMLVNQLAKDKTISVLGCGTQMYFYLQLGGAECCLLAAMAYDRYVAICHPLRYSVLMSHRVCLLLASGCWFVGSVDGFMLTPIAMSFPFCRSHEIQHFFCEVPAVLKLSCSDTSLYKIFMYLCCVIMLLIPVTVISVSYYYIILTIHKMNSVEGRKKAFTTCSSHITVVSLFYGAAIYNYMLPSSYQTPEKDMMSSFFYTILTPVLNPIIYSFRNKDVTRALKKMLSVQKPPY

SEQ ID NO: 612 - protein, 317 aa, Homo sapiens
MLTFHNVCSVPSSFWLTGIPGLESLHVWLSIPFGSMYLVAVVGNVTILAVVKIERSLHQPMYFFLCMLAAIDLVLSTSTIPKLLGIFWFGACDIGLDACLGQMFLIHCFATVESGIFLAMAFDRYVAICNPLRHSMVLTYTVVGRLGLVSLLRGVLYIGPLPLMIRLRLPLYKTHVISHSYCEHMAVVALTCGDSRVNNVYGLSIGFLVLILDSVAIAASYVMIFRAVMGLATPEARLKTLGTCASHLCAILIFYVPIAVSSLIHRFGQCVPPPVHTLLANFYLLIPPILNPIVYAVRTKQIRESLLQIPRIEMKIR

SEQ ID NO: 613 - protein, 354 aa, Homo sapiens
MMSYLKQPPYGMNGLGLAGPAMDLLHPSVGYPATPRKQRRERTTFTRSQLDVLEALFAKTRYPDIFMREEVALKINLPESRVQVWFKNRRAKCRQQQQSGSGTKSRPAKKKSSPVRESSGSESSGQFTPPAVSSSASSSSSASSSSANPAAAAAAGLGGNPVAAASSLSTPAASSIWSPASISPGSAPASVSVPEPLAAPSNTSCMQRSVAAGAATAAASYPMSYGQGGSYGQGYPTPSSSYFGGVDCSSYLAPMHSHHHPHQLSPMAPSSMAGHHHHHPHAHHPLSQSSGHHHHHHHHHHQGYGGSGLAFNSADCLDYKEPGAAAASSAWKLNFNSPDCLDYKDQASWRFQVL

SEQ ID NO: 614 - protein, 125 aa, Homo sapiens
MAGPSLACCLLGLLALTSACYIQNCPLGGKRAAPDLDVRKCLPCGPGGKGRCFGPNICCAEELGCFVGTAEALRCQEENYLPSPCQSGQKACGSGGRCAVLGLCCSPDGCHADPACDAEATFSQR

SEQ ID NO: 615 - protein, 389 aa, Homo sapiens
MEGALAANWSAEAANASAAPPGAEGNRTAGPPRRNEALARVEVAVLCLILLLALSGNACVLLALRTTRQKHSRLFFFMKHLSIADLVVAVFQVLPQLLWDITFRFYGPDLLCRLVKYLQVVGMFASTYLLLLMSLDRCLAICQPLRSLRRRTDRLAVLATWLGCLVASAPQVHIFSLREVADGVFDCWAVFIQPWGPKAYITWITLAVYIVPVIVLAACYGLISFKIWQNLRLKTAAAAAAEAPEGAAAGDGGRVALARVSSVKLISKAKIRTVKMTFIIVLAFIVCWTPFFFVQMWSVWDANAPKEASAFIIVMLLASLNSCCNPWIYMLFTGHLFHELVQRFLCCSASYLKGRRLGETSASKKSNSSSFVLSHRSSSQRSCSQPSTA

SEQ ID NO: 616 - protein, 404 aa, Homo sapiens
MAGCCAALAAFLFEYDTPRIVLIRSRKVGLMNRAVQLLILAYVIGCYHPHLAEVEMESPRRWVFVWEKGYQETDSVVSSVTTKVKGVAVTNTSKLGFRIWDVADYVIPAQEENSLFVMTNVILTMNQTQGLCPEIPDATTVCKSDASCTAGSAGTHSNGVSTGRCVAFNGSVKTCEVAAWCPVEDDTHVPQPAFLKAAENFTLLVKNNIWYPKFNFSKRNILPNITTTYLKSCIYDAKTDPFCPIFRLGKIVENAGHSFQDMAVEGGIMGIQVNWDCNLDRAASLCLPRYSFRRLDTRDVEHNVSPGYNFRFAKYYRDLAGNEQRTLIKAYGIRFDIIVFGKAGKFDIIPTMINIGSGLALLGMATVLCDIIVLYCMKKRLYYREKKYKYVEDYEQGLASELDQ

SEQ ID NO: 617 - protein, 422 aa, Homo sapiens
MGQAGCKGLCLSLFDYKTEKYVIAKNKKVGLLYRLLQASILAYLVVWVFLIKKGYQDVDTSLQSAVITKVKGVAFTNTSDLGQRIWDVADYVIPAQGENVFFVVTNLIVTPNQRQNVCAENEGIPDGACSKDSDCHAGEAVTAGNGVKTGRCLRRENLARGTCEIFAWCPLETSSRPEEPFLKEAEDFTIFIKNHIRFPKFNFSKSNVMDVKDRSFLKSCHFGPKNHYCPIFRLGSVIRWAGSDFQDIALEGGVIGINIEWNCDLDKAASECHPHYSFSRLDNKLSKSVSSGYNFRFARYYRDAAGVEFRTLMKAYGIRFDVMVNGKGAFFCDLVLIYLIKKREFYRDKKYEEVRGLEDSSQEAEDEASGLGLSEQLTSGPGLLGMPEQQELQEPPEAKRGSSSQKGNGSVCPQLLEPHRST

SEQ ID NO: 618 - protein, 535 aa, Homo sapiens
MKLWVSALLMAWFGVLSCVQAEFFTSIGHMTDLIYAEKELVQSLKEYILVEEAKLSKIKSWANKMEALTSKSAADAEGYLAHPVNAYKLVKRLNTDWPALEDLVLQDSAAGFIANLSVQRQFFPTDEDEIGAAKALMRLQDTYRLDPGTISRGELPGTKYQAMLSVDDCFGMGRSAYNEGDYYHTVLWMEQVLKQLDAGEEATTTKSQVLDYLSYAVFQLGDLHRALELTRRLLSLDPSHERAGGNLRYFEQLLEEEREKTLTNQTEAELATPEGIYERPVDYLPERDVYESLCRGEGVKLTPRRQKRLFCRYHHGNRAPQLLIAPFKEEDEWDSPHIVRYYDVMSDEEIERIKEIAKPKLARATVRDPKTGVLTVASYRVSKSSWLEEDDDPVVARVNRRMQHITGLTVKTAELLQVANYGVGGQYEPHFDFSRNDERDTFKHLGTGNRVATFLNYMSDVEAGGATVFPDLGAAIWPKKGTAVFWYNLLRSGEGDYRTRHAACPVLVGCKWVSNKWFHERGQEFLRPCGSTEVD

SEQ ID NO: 619 - protein, 963 aa, Homo sapiens
MAERGGAGGGPGGAGGGSGQRGSGVAQSPQQPPPQQQQQQPPQQPTPPKLAQATSSSSSTSAAAASSSSSSTSTSMAVAVASGSAPPGGPGPGRTPAPVQMNLYATWEVDRSSSSCVPRLFSLTLKKLVMLKEMDKDLNSVVIAVKLQGSKRILRSNEIVLPASGLVETELQLTFSLQYPHFLKRDANKLQIMLQRRKRYKNRTILGYKTLAVGLINMAEVMQHPNEGALVLGLHSNVKDVSVPVAEIKIYSLSSQPIDHEGIKSKLSDRSPDIDNYSEEEEESFSSEQEGSDDPLHGQDLFYEDEDLRKVKKTRRKLTSTSAITRQPNIKQKFVALLKRFKVSDEVGFGLEHVSREQIREVEEDLDELYDSLEMYNPSDSGPEMEETESILSTPKPKLKPFFEGMSQSSSQTEIGSLNSKGSLGKDTTSPMELAALEKIKSTWIKNQDDSLTETDTLEITDQDMFGDASTSLVVPEKVKTPMKSSKTDLQGSASPSKVEGVHTPRQKRSTPLKERQLSKPLSERTNSSDSERSPDLGHSTQIPRKVVYDQLNQILVSDAALPENVILVNTTDWQGQYVAELLQDQRKPVVCTCSTVEVQAVLSALLTRIQRYCNCNSSMPRPVKVAAVGGQSYLSSILRFFVKSLANKTSDWLGYMRFLIIPLGSHPVAKYLGSVDSKYSSSFLDSGWRDLFSRSEPPVSEQLDVAGRVMQYVNGAATTHQLPVAEAMLTCRHKFPDEDSYQKFIPFIGVVKVGLVEDSPSTAGDGDDSPVVSLTVPSTSPPSSSGLSRDATATPPSSPSMSSALAIVGSPNSPYGDVIGLQVDYWLGHPGERRREGDKRDASSKNTLKSVFRSVQVSRLPHSGEAQLSGTMAMTVVTKEKNKKVPTIFLSKKPREKEVDSKSQVIEGISRLICSAKQQQTMLRVSIDGVEWSDIKFFQLAAQWPTHVKHFPVGLFSGSKAT

SEQ ID NO: 620 - protein, 410 aa, Homo sapiens
MVLSQRQRDELNRAIADYLRSNGYEEAYSVFKKEAELDVNEELDKKYAGLLEKKWTSVIRLQKKVMELESKLNEAKEEFTSGGPLGQKRDPKEWIPRPPEKYALSGHRSPVTRVIFHPVFSVMVSASEDATIKVWDYETGDFERTLKGHTDSVQDISFDHSGKLLASCSADMTIKLWDFQGFECIRTMHGHDHNVSSVAIMPNGDHIVSASRDKTIKMWEVQTGYCVKTFTGHREWVRMVRPNQDGTLIASCSNDQTVRVWVVATKECKAELREHEHVVECISWAPESSYSSISEATGSETKKSGKPGPFLLSGSRDKTIKMWDVSTGMCLMTLVGHDNWVRGVLFHSGGKFILSCADDKTLRVWDYKNKRCMKTLNAHEHFVTSLDFHKTAPYVVTGSVDQTVKVWECR

SEQ ID NO: 621 - protein, 452 aa, Homo sapiens
MSTAVLENPGLGRKLSDFGQETSYIEDNCNQNGAISLIFSLKEEVGALAKVLRLFEENDVNLTHIESRPSRLKKDEYEFFTHLDKRSLPALTNIIKILRHDIGATVHELSRDKKKDTVPWFPRTIQELDRFANQILSYGAELDADHPGFKDPVYRARRKQFADIAYNYRHGQPIPRVEYMEEEKKTWGTVFKTLKSLYKTHACYEYNHIFPLLEKYCGFHEDNIPQLEDVSQFLQTCTGFRLRPVAGLLSSRDFLGGLAFRVFHCTQYIRHGSKPMYTPEPDICHELLGHVPLFSDRSFAQFSQEIGLASLGAPDEYIEKLATIYWFTVEFGLCKQGDSIKAYGAGLLSSFGELQYCLSEKPKLLPLELEKTAIQNYTVTEFQPLYYVAESFNDAKEKVRNFAATIPRPFSVRYDPYTQRIEVLDNTQQLKILADSINSEIGILCSALQKIK

SEQ ID NO: 622 - protein, 1143 aa, Homo sapiens
MKVTVCFGRTGIVVPCKEGQLRVGELTQQALQRYLKTREKGPGYWVKIHHLEYTDGGILDPDDVLADVVEDKDKLIAVFEEQEPLHKIESPSGNPADRQSPDAFETEVAAQLAAFKPIGGEIEVTPSALKLGTPLLVRRSSDPVPGPPADTQPSASHPGGQSLKLVVPDSTQNLEDREVLNGVQTELLTSPRTKDTLSDMTRTVEISGEGGPLGIHVVPFFSSLSGRILGLFIRGIEDNSRSKREGLFHENECIVKINNVDLVDKTFAQAQDVFRQAMKSPSVLLHVLPPQNREQYEKSVIGSLNIFGNNDGVLKTKVPPPVHGKSGLKTANLTGTDSPETDASASLQQNKSPRVPRLGGKPSSPSLSPLMGFGSNKNAKKIKIDLKKGPEGLGFTVVTRDSSIHGPGPIFVKNILPKGAAIKDGRLQSGDRILEVNGRDVTGRTQEELVAMLRSTKQGETASLVIARQEGHFLPRELDGRLRMNDQLIAVNGESLLGKSNHEAMETLRRSMSMEGNIRGMIQLVILRRPERPMEDPAECGAFSKPCFENCQNAVTTSRRNDNSILHPLGTCSPQDKQKGLLLPNDGWAESEVPPSPTPHSALGLGLEDYSHSSGVDSAVYFPDQHINFRSVTPARQPESINLKASKSMDLVPDESKVHSLAGQKSESPSKDFGPTLGLKKSSSLESLQTAVAEVRKNDLPFHRPRPHMVRGRGCNESFRAAIDKSYDGPEEIEADGLSDKSSHSGQGALNCESAPQGNSELEDMENKARKVKKTKEKEKKKEKGKLKVKEKKRKEENEDPERKIKKKGFGAMLRFGKKKEDKGGKAEQKGTLKHGGLREEELEKMKEERERIGAKHQELREKQARGLLDYATGAIGSVYDMDDDEMDPNYARVNHFREPCTSANVFRSPSPPRAGPFGYPRDGHPLSPERDHLEGLYAKVNKPYHPLVPADSGRPTGGSTDRIQKLRKEYYQARREGFPLYEDDEGRARPSEYDLLWVPGRGPDGNAHNLRFEGMERQYASLPRGGPADPVDYLPAAPRGLYKERELPYYPGAHPMHPPKGSYPRPTELRVADLRYPQHYPPPPAPQHKGPFRQDVPPSPPQHQRMPAYQETGRPGPRGGSPDQYPYRTQDSRQKNPMTAAV

SEQ ID NO: 623 - protein, 465 aa, Homo sapiens
MIVFVRFNSSHGFPVEVDSDTSIFQLKEVVAKRQGVPADQLRVIFAGKELRNDWTVQNCDLDQQSIVHIVQRPWRKGQEMNATGGDDPRNAAGGCEREPQSLTRVDLSSSVLPGDSVGLAVILHTDSRKDSPPAGSPAGRSIYNSFYVYCKGPCQRVQPGKLRVQCSTCRQATLTLTQGPSCWDDVLIPNRMSGECQSPHCPGTSAEFFFKCGAHPTSDKETSVALHLIATNSRNITCITCTDVRSPVLVFQCNSRHVICLDCFHLYCVTRLNDRQFVHDPQLGYSLPCVAGCPNSLIKELHHFRILGEEQYNRYQQYGAEECVLQMGGVLCPRPGCGAGLLPEPDQRKVTCEGGNGLGCGFAFCRECKEAYHEGECSAVFEASGTTTQAYRVDERAAEQARWEAASKETIKKTTKPCPRCHVPVEKNGGCMHMKCPQPQCRLEWCWNCGCEWNRVCMGDHWFDV

SEQ ID NO: 624 - protein, 391 aa, Homo sapiens
MDLEKNYPTPRTSRTGHGGVNQLGGVFVNGRPLPDVVRQRIVELAHQGVRPCDISRQLRVSHGCVSKILGRYYETGSIKPGVIGGSKPKVATPKVVEKIAEYKRQNPTMFAWEIRDRLLAERVCDNDTVPSVSSINRIIRTKVQQPPNQPVPASSHSIVSTGSVTQVSSVSTDSAGSSYSISGILGITSPSADTNKRKRDEGIQESPVPNGHSLPGRDFLRKQMRGDLFTQQQLEVLDRVFERQHYSDIFTTTEPIKPEQTTEYSAMASLAGGLDDMKANLASPTPADIGSSVPGPQSYPIVTGRDLASTTLPGYPPHVPPAGQGSYSAPTLTGMVPGSEFSGSPYSHPQYSSYNDSWRFPNPGLLGSPYYYSAAARGAAPPAAATAYDRH

SEQ ID NO: 625 - protein, 436 aa, Homo sapiens
MQNSHSGVNQLGGVFVNGRPLPDSTRQKIVELAHSGARPCDISRILQTHADAKVQVLDNQNVSNGCVSKILGRYYETGSIRPRAIGGSKPRVATPEVVSKIAQYKRECPSIFAWEIRDRLLSEGVCTNDNIPSVSSINRVLRNLASEKQQMGADGMYDKLRMLNGQTGSWGTRPGWYPGTSVPGQPTQDGCQQQEGGGENTNSISSNGEDSDEAQMRLQLKRKLQRNRTSFTQEQIEALEKEFERTHYPDVFARERLAAKIDLPEARIQVWFSNRRAKWRREEKLRNQRRQASNTPSHIPISSSFSTSVYQPIPQPTTPVSSFTSGSMLGRTDTALTNTYSALPPMPSFTMANNLPMQPPVPSQTSSYSCMLPTSPSVNGRSYDTYTPPHMQTHMNSQPMGTSGTTSTGLISPGVSVPVQVPGSEPDMSQYWPRLQ

SEQ ID NO: 626 - protein, 728 aa, Homo sapiens
MAGFWVGTAPLVAAGRRGRWPPQQLMLSAALRTLKHVLYYSRQCLMVSRNLGSVGYDPNEKTFDKILVANRGEIACRVIRTCKKMGIKTVAIHSDVDASSVHVKMADEAVCVGPAPTSKSYLNMDAIMEAIKKTRAQAVHPGYGFLSENKEFARCLAAEDVVFIGPDTHAIQAMGDKIESKLLAKKAEVNTIPGFDGVVKDAEEAVRIAREIGYPVMIKASAGGGGKGMRIAWDDEETRDGFRLSSQEAASSFGDDRLLIEKFIDNPRHIEIQVLGDKHGNALWLNERECSIQRRNQKVVEEAPSIFLDAETRRAMGEQAVALARAVKYSSAGTVEFLVDSKKNFYFLEMNTRLQVEHPVTECITGLDLVQEMIRVAKGYPLRHKQADIRINGWAVECRVYAEDPYKSFGLPSIGRLSQYQEPLHLPGVRVDSGIQPGSDISIYYDPMISKLITYGSDRTEALKRMADALDNYVIRGVTHNIALLREVIINSRFVKGDISTKFLSDVYPDGFKGHMLTKSEKNQLLAIASSLFVAFQLRAQHFQENSRMPVIKPDIANWELSVKLHDKVHTVVASNNGSVFSVEVDGSKLNVTSTWNLASPLLSVSVDGTQRTVQCLSREAGGNMSIQFLGTVYKVNILTRLAAELNKFMLEKVTEDTSSVLRSPMPGVVVAVSVKPGDAVAEGQEICVIEAMKMQNSMTAGKTGTVKSVHCQAGDTVGEGDLLVELE

SEQ ID NO: 627 - protein, 559 aa, Homo sapiens
MAAALRVAAVGARLSVLASGLRAAVRSLCSQATSVNERIENKRRTALLGGGQRRIDAQHKRGKLTARERISLLLDPGSFVESDMFVEHRCADFGMAADKNKFPGDSVVTGRGRINGRLVYVFSQQIIGWAQWLPLVISALWEAEDFTVFGGSLSGAHAQKICKIMDQAITVGAPVIGLNDSGGARIQEGVESLAGYADIFLRNVTASGVIPQISLIMGPCAGGAVYSPALTDFTFMVKDTSYLFITGPDVVKSVTNEDVTQEELGGAKTHTTMSGVAHRAFENDVDALCNLRDFFNYLPLSSQDPAPVRECHDPSDRLVPELDTIVPLESTKAYNMVDIIHSVVDEREFFEIMPNYAKNIIVGFARMNGRTVGIVGNQPKVASGCLDINSSVKGARFVRFCDAFNIPLITFVDVPGFLPGTAQEYGGIIRHGAKLLYAFAEATVPKVTVITRKAYGGAYDVMSSKHLCGDTNYAWPTAEIAVMGAKGAVEIIFKGHENVEAAQAEYIEKFANPFPAAVRGFVDDIIQPSSTRARICCDLDVLASKKVQRPWRKHANIPL

SEQ ID NO: 628 - protein, 1040 aa, Homo sapiens
MIVLLLFALLWMVEGVFSQLHYTVQEEQEHGTFVGNIAEDLGLDITKLSARGFQTVPNSRTPYLDLNLETGVLYVNEKIDREQICKQSPSCVLHLEVFLENPLELFQVEIEVLDINDNPPSFPEPDLTVEISESATPGTRFPLESAFDPDVGTNSLRDYEITPNSYFSLDVQTQGDGNRFAELVLEKPLDREQQAVHRYVLTAVDGGGGGGVGEGGGGGGGAGLPPQQQRTGTALLTIRVLDSNDNVPAFDQPVYTVSLPENSPPGTLVIQLNATDPDEGQNGEVVYSFSSHISPRARELFGLSPRTGRLEVSGELDYEESPVYQVYVQAKDLGPNAVPAHCKVLVRVLDANDNAPEISFSTVKEAVSEGAAPGTVVALFSVTDRDSEENGQVQCELLGDVPFRLKSSFKNYYTIVTEAPLDREAGDSYTLTVVARDRGEPALSTSKSIQVQVSDVNDNAPRFSQPVYDVYVTENNVPGAYIYAVSATDRDEGANAQLAYSILECQIQGMSVFTYVSINSENGYLYALRSFDYEQLKDFSFQVEARDAGSPQALAGNATVNILIVDQNDNAPAIVAPLPGRNGTPAREVLPRSAEPGYLLTRVAAVDADDGENARLTYSIVRGNEMNLFRMDWRTGELRTARRVPAKRDPQRPYELVIEVRDHGQPPLSSTATLVVQLVDGAVEPQGGGGSGGGGSGEHQRPSRSGGGETSLDLTLILIIALGSVSFIFLLAMIVLAVRCQKEKKLNIYTCLASDCCLCCCCCGGGGSTCCGRQARARKKKLSKSDIMLVQSSNVPSNPAQVPIEESGGFGSHHHNQNYCYQVCLTPESAKTDLMFLKPCSPSRSTDTEHNPCGAIVTGYTDQQPDIISNGSILSNETKHQRAELSYLVDRPRRVNSSAFQEADIVSSKDSGHGDSEQGDSDHDATNRAQSAGMDLFSNCTEECKALGHSDRCWMPSFVPSDGRQAADYRSNLHVPGMDSVPDTEVFETPEAQPGAERSFSTFGKEKALHSTLERKELDGLLTNTRAPYKPPYLTRKRIC

SEQ ID NO: 629 - protein, 1962 aa, Homo sapiens
MFRQFYLWTCLASGIILGSLFEICLGQYDDDWQYEDCKLARGGPPATIVAIDEESRNGTILVDNMLIKGTAGGPDPTIELSLKDNVDYWVLMDPVKQMLFLNSTGRVLDRDPPMNIHSIVVQVQCINKKVGTIIYHEVRIVVRDRNDNSPTFKHESYYATVNELTPVGTTIFTGFSGDNGATDIDDGPNGQIEYVIQYNPDDPTSNDTFEIPLMLTGNIVLRKRLNYEDKTRYFVIIQANDRAQNLNERRTTTTTLTVDVLDGDDLGPMFLPCVLVPNTRDCRPLTYQAAIPELRTPEELNPIIVTPPIQAIDQDRNIQPPSDRPGILYSILVGTPEDYPRFFHMHPRTAELSLLEPVNRDFHQKFDLVIKAEQDNGHPLPAFAGLHIEILDENNQSPYFTMPSYQGYILESAPVGATISDSLNLTSPLRIVALDKDIEDTKDPELHLFLNDYTSVFTVTQTGITRYLTLLQPVDREEQQTYTFSITAFDGVQESEPVIVNIQVMDANDNTPTFPEISYDVYVYTDMRPGDSVIQLTAVDADEGSNGEITYEILVGAQGDFIINKTTGLITIAPGVEMIVGRTYALTVQAADNAPPAERRNSICTVYIEVLPPNNQSPPRFPQLMYSLEISEAMRVGAVLLNLQATDREGDSITYAIENGDPQRVFNLSETTGILTLGKALDRESTDRYILIITASDGRPDGTSTATVNIVVTDVNDNAPVFDPYLPRNLSVVEEEANAFVGQVKATDPDAGINGQVHYSLGNFNNLFRITSNGSIYTAVKLNREVRDYYELVVVATDGAVHPRHSTLTLAIKVLDIDDNSPVFTNSTYTVLVEENLPAGTTILQIEAKDVDLGANVSYRIRSPEVKHFFALHPFTGELSLLRSLDYEAFPDQEASITFLVEAFDIYGTMPPGIATVTVIVKDMNDYPPVFSKRIYKGMVAPDAVKGTPITTVYAEDADPPGLPASRVRYRVDDVQFPYPASIFEVEEDSGRVITRVNLNEEPTTIFKLVVVAFDDGEPVMSSSATVKILVLHPGEIPRFTQEEYRPPPVSELATKGTMVGVISAAAINQSIVYSIVSGNEEDTFGINNITGVIYVNGPLDYETRTSYVLRVQADSLEVVLANLRVPSKSNTAKVYIEIQDENNHPPVFQKKFYIGGVSEDARMFTSVLRVKATDKDTGNYSVMAYRLIIPPIKEGKEGFVVETYTGLIKTAMLFHNMRRSYFKFQVIATDDYGKGLSGKADVLVSVVNQLDMQVIVSNVPPTLVEKKIEDLTEILDRYVQEQIPGAKVVVESIGARRHGDAFSLEDYTKCDLTVYAIDPQTNRAIDRNELFKFLDGKLLDINKDFQPYYGEGGRILEIRTPEAVTSIKKRGESLGYTEGALLALAFIIILCCIPAILVVLVSYRQFKVRQAECTKTARIQAALPAAKPAVPAPAPVAAPPPPPPPPPGAHLYEELGDSSMHNLFLLYHFQQSRGNNSVSEDRKHQQVVMPFSSNTIEAHKSAHVDGSLKSNKLKSARKFTFLSDEDDLSAHNPLYKENISQVSTNSDISQRTDFVDPFSPKIQAKSKSLRGPREKIQRLWSQSVSLPRRLMRKVPNRPEIIDLQQWQGTRQKAENENTGICTNKRGSSNPLLTTEEANLTEKEEIRQGETLMIEGTEQLKSLSSDSSFCFPRPHFSFSTLPTVSRTVELKSEPNVISSPAECSLELSPSRPCVLHSSLSRRETPICMLPIETERNIFENFAHPPNISPSACPLPPPPPISPPSPPPAPAPLAPPPDISPFSLFCPPPSPPSIPLPLPPPTFFPLSVSTSGPPTPPLLPPFPTPLPPPPPSIPCPPPPSASFLSTECVCITGVKCTTNLMPAEKIKSSMTQLSTTTVCKTDPQREPKGILRHVKNLAELEKSVANMYSQIEKNYLRTNVSELQTMCPSEVTNMEITSEQNKGSLNNIVEGTEKQSHSQSTSL

SEQ ID NO: 630 - protein, 1148 aa, Homo sapiens
MESLLLPVLLLLAILWTQAAALINLKYSVEEEQRAGTVIANVAKDAREAGFALDPRQASAFRVVSNSAPHLVDINPSSGLLVTKQKIDRDLLCRQSPKCIISLEVMSSSMEICVIKVEIKDLNDNAPSFPAAQIELEISEAASPGTRIPLDSAYDPDSGSFGVQTYELTPNELFGLEIKTRGDGSRFAELVVEKSLDRETQSHYSFRITALDGGDPPRLGTVGLSIKVTDSNDNNPVFSESTYAVSVPENSPPNTPVIRLNASDPDEGTNGQVVYSFYGYVNDRTRELFQIDPHSGLVTVTGALDYEEGHVYELDVQAKDLGPNSIPAHCKVTVSVLDTNDNPPVINLLSVNSELVEVSESAPPGYVIALVRVSDRDSGLNGRVQCRLLGNVPFRLQEYESFSTILVDGRLDREQHDQYNLTIQARDGGVPMLQSAKSFTVLITDENDNHPHFSKPYYQVIVQENNTPGAYLLSVSARDPDLGLNGSVSYQIVPSQVRDMPVFTYVSINPNSGDIYALRSFNHEQTKAFEFKVLAKDGGLPSLQSNATVRVIILDVNDNTPVITAPPLINGTAEVYIPRNSGIGYLVTVVKAEDYDEGENGRVTYDMTEGDRGFFEIDQVNGEVRTTRTFGESSKSSYELIVVAHDHGKTSLSASALVLIYLSPALDAQESMGSVNLSLIFIIALGSIAGILFVTMIFVAIKCKRDNKEIRTYNCSNCLTITCLLGCFIKGQNSKCLHCISVSPISEEQDKKTEEKVSLRGKRIAEYSYGHQKKSSKKKKISKNDIRLVPRDVEETDKMNVVSCSSLTSSLNYFDYHQQTLPLGCRRSESTFLNVENQNTRNTSANHIYHHSFNSQGPQQPDLIINGVPLPETENYSFDSNYVNSRAHLIKSSSTFKDLEGNSLKDSGHEESDQTDSEHDVQRSLYCDTAVNDVLNTSVTSMGSQMPDHDQNEGFHCREECRILGHSDRCWMPRNPMPIRSKSPEHVRNIIALSIEATAADVEAYDDCGPTKRTFATFGKDVSDHPAEERPTLKGKRTVDVTICSPKVNSVIREAGNGCEAISPVTSPLHLKSSLPTKPSVSYTIALAPPARDLEQYVNNVNNGPTRPSEAEPRGADSEKVMHEVSPILKEGRNKESPGVKRLKDIVL

SEQ ID NO: 631 - protein, 1070 aa, Homo sapiens
MSPVRRWGSPCLFPLQLFSLCWVLSVAQSKTVRYSTFEEDAPGTVIGTLAEDLHMKVSGDTSFRLMKQFNSSLLRVREGDGQLTVGDAGLDRERLCGQAPQCVLAFDVVSFSQEQFRLVHVEVEVRDVNDHAPRFPRAQIPVEVSEGAAVGTRIPLEVPVDEDVGANGLQTVRLAEPHSPFRVELQTRADGAQCADLVLLQELDRESQAAYSLELVAQDGGRPPRSATAALSVRVLDANDHSPAFPQGAVAEVELAEDAPVGSLLLDLDAADPDEGPNGDVVFAFGARTPPEARRLFRLDPRSGRLTLAGPVDYERQDTYELDVRAQDRGPGPRAATCKVIVRIRDVNDNAPDIAITPLAAPGAPATSPFAAAAAAAALGGADASSPAGAGTPEAGATSLVPEGAARESLVALVSTSDRDSGANGQVRCALYGHEHFRLQPAYAGSYLVVTAASLDRERIAEYNLTLVAEDRGAPPLRTVRPYTVRVGDENDNAPLFTRPVYEVSVRENNPPGAYLATVAARDRDLGRNGQVTYRLLEAEVGRAGGAVSTYVSVDPATGAIYALRSFDYETLRQLDVRIQASDGGSPQLSSSALVQVRVLDQNDHAPVLVHPAPANGSLEVAVPGRTAKDTVVARVQARDADEGANGELAFELQQQEPREAFAIGRRTGEILLTGDLSQEPPGRVFRALLVISDGGRPPLTTTATVSFVVTAGGGRGPAAPASAGSPERSRPPGSRLGVSGSVLQWDTPLIVIIVLAGSCTLLLAAIIAIATTCNRRKKEVRKGGALREERPGAAGGGASAPGSPEEAARGAGPRPNMFDVLTFPGTGKAPFGSPAADAPPPAVAAAEVPGSEGGSATGESACHFEGQQRLRGAHAEPYGASPGFGKEPAPPVAVWKGHSFNTISGREAEKFSGKDSGKGDSDFNDSDSDISGDALKKDLINHMQSGLWACTAECKILGHSDRCWSPSCSGPNAHPSPHPPAQMSTFCKSTSLPRDPLRRDNYYQAQLPKTVGLQSVYEKVLHRDYDRTVTLLSPPRPGRLPDLQEIGVPLYQSPPGRYLSPKKGANENV

SEQ ID NO: 632 - protein, 1237 aa, Homo sapiens
MDLRDFYLLAALIACLRLDSAIAQELIYTIREELPENVPIGNIPKDLNISHINAATGTSASLVYRLVSKAGDAPLVKVSSSTGEIFTTSNRIDREKLCAGASYAEENECFFELEVVILPNDFFRLIKIKIIVKDTNDNAPMFPSPVINISIPENTLINSRFPIPSATDPDTGFNGVQHYELLNGQSVFGLDIVETPEGEKWPQLIVQQNLDREQKDTYVMKIKVEDGGTPQKSSTAILQVTVSDVNDNRPVFKEGQVEVHIPENAPVGTSVIQLHATDADIGSNAEIRYIFGAQVAPATKRLFALNNTTGLITVQRSLDREETAIHKVTVLASDGSSTPARATVTINVTDVNDNPPNIDLRYIISPINGTVYLSEKDPVNTKIALITVSDKDTDVNGKVICFIEREVPFHLKAVYDNQYLLETSSLLDYEGTKEFSFKIVASDSGKPSLNQTALVRVKLEDENDNPPIFNQPVIELSVSENNRRGLYLTTISATDEDSGKNADIVYQLGPNASFFDLDRKTGVLTASRVFDREEQERFIFTVTARDNGTPPLQSQAAVIVTVLDENDNSPKFTHNHFQFFVSENLPKYSTVGVITVTDADAGENKAVTLSILNDNDNFVLDPYSGVIKSNVSFDREQQSSYTFDVKATDGGQPPRSSTAKVTINVMDVNDNSPVVISPPSNTSFKLVPLSAIPGSVVAEVFAVDVDTGMNAELKYTIVSGNNKGLFRIDPVTGNITLEEKPAPTDVGLHRLVVNISDLGYPKSLHTLVLVFLYVNDTAGNASYIYDLIRRTMETPLDRNIGDSSQPYQNEDYLTIMIAIIAGAMVVIVVIFVTVLVRCRHASRFKAAQRSKQGAEWMSPNQENKQNKKKKRKKRKSPKSSLLNFVTIEESKPDDAVHEPINGTISLPAELEEQSIGRFDWGPAPPTTFKPNSPDLAKHYKSASPQPAFHLKPDTPVSVKKHHVIQELPLDNTFVGGCDTLSKRSSTSSDHFSASECSSQGGFKTKGPLHTRQCNSHSKSDNIPVTPQKCPSSTGFHIQENEESHYESQRRVTFHLPDGSQESCSDSGLGDHEPVGSGTLISHPLPLVQPQDEFYDQASPDKRTEADGNSDPNSDGPLGPRGLAEATEMCTQECLVLGHSDNCWMPPGLGPYQHPKSPLSTFAPQKEWVKKDKLVNGHTLTRAWKEDSNRNQFNDRKQYGSNEGHFNNGSHMTDIPLANLKSYKQAGGATESPKEHQL

SEQ ID NO: 633 - protein, 950 aa, Homo sapiens
MVFSRRGGLGARDLLLWLLLLAAWEVGSGQLHYSIPEEAKHGTFVGRVAQDLGLELAELVPRLFRVASKTHRDLLEVNLQNGILFVNSRIDREELCQWSAECSIHLELIADRPLQVFHVEVKVKDINDNPPVFRGREQIIFIPESRLLNSRFPIEGAADADIGANALLTYTLSPSDYFSLDVEASDELSKSLWLELRKYLDREETPELHLLLTATDGGKPELQGTVELLITVLDVNDNAPLFDQAVYRVHLLETTANGTLVTTLNASDADEGVNGEVVFSFDSGISRDIQEKFKVDSSSGEIRLIDKLDYEETKSYEIQVKAVDKGSPPMSNHCKVLVKVLDVNDNAPELAVTSLYLPIREDAPLSTVIALITVSDRDSGANGQVTCSLMPHVPFKLVSTFKNYYSLVLDSALDRESLSVYELVVTARDGGSPSLWATARVSVEVADVNDNAPAFAQPEYTVFVKENNPPGCHIFTVSARDADAQENALVSYSLVERRVGERALSNYVSVHAESGKVYALQPLDHEELELLQFQVSARDAGVPPLGSNVTLQVFVLDENDNAPALLAPRVGGTIGAVSELVPRLVGAGHVVAKVRAVDADSGYNAWLSYELQPAAGGARIPFRVGLYTGEISTTRVLDEADLSRYRLLVLVKDHGEPALTATATVLVSLVESGQAPKASSRASVGVAGPEAALVDVNVYLIIAICAVSSLLVLTLLLYTALRCSVPPTEGAYVPGKPTLVCSSALGSWSNSQQRRQRVCSSEGPPKTDLMAFSPGLSPSLNTSERNEQPEANLDLSGNPRQPNPDWRYSASLRAGMHSSVHLEEAGILRAGPGGPDQQWPTVSSATPEPEAGEVSPPVGAGVNSNSWTFKYGPGNPKQSGPGELPDKFIIPGSPAIISIRQEPTNSQIDKSDFITFGKKEETKKKKKKKKGNKTQEKKEKGNSTTDNSDQ

SEQ ID NO: 634 - protein, 948 aa, Homo sapiens
MVSRCSCLGVQCLLLSLLLLAAWEVGSGQLHYSVYEEARHGTFVGRIAQDLGLELAELVQRLFRVASKRHGDLLEVNLQNGILFVNSRIDREELCGRSVECSIHLEVIVDRPLQVFHVDVEVKDINDNPPRFSVTEQKLSIPESRLLDSRFPLEGASDADVGENALLTYKLSPNEYFVLDIINKKDKDKFPVLVLRKLLDREENPQLKLLLTATDGGKPEFTGSVSLLILVLDANDNAPIFDRPVYEVKMYENQVNQTLVIRLNASDSDEGINKEMMYSFSSLVPPTIRRKFWINERTGEIKVNDAIDFEDSNTYEIHVDVTDKGNPPMVGHCTVLVELLDENDNSPEVIVTSLSLPVKEDAQVGTVIALISVSDHDSGANGQVTCSLTPHVPFKLVSTYKNYYSLVLDSALDRERVSAYELVVTARDGGSPPLWATASVSVEVADVNDNAPAFAQSEYTVFVKENNPPGCHIFTVSAWDADAQENALVSYSLVERRLGERSLSSYVSVHAESGKVYALQPLDHEELELLQFQVSARDGGVPPLGSNLTLQVFVLDENDNAPALLASPAGSAGGAVSELVLRSVVAGHVVAKVRAVDADSGYNAWLSYELQSAAVGARIPFRVGLYTGEISTTRALDETDSPRQRLLVLVKDHGEPSLTATATVLVSLVEGSQAPKASSRASVGVAPEVALVDVNVYLIIAICAVSSLLVLTLLLYTALRCSAAPTEGACGPVKPTLVCSSAVGSWSYSQQRRQRVCSGEGLPKADLMAFSPSLPPCPMVDVDGEDQSIGGDHSRKPRQPNPDWRYSASLRAGMHSSVHLEEAGILRAGPGGPDQQWPTVSSATPEPEAGEVSPPVGAGVNSNSWTFKYGPGNPKQSGPGELPDKFIIPGSPAIISIRQEPTNSQIDKSDFITFGKKEETKKKKKKKKGNKTQEKKEKGNSTTDNSDQ

SEQ ID NO: 635 - protein, 949 aa, Homo sapiens
MFGFQRRGLGTPRLQLWLLLLEFWEVGSGQLHYSVSEEAKHGTFVGRIAQDLGLELAELVQRLFRVASKTHGDLLEVNLQNGILFVNSRIDREELCGQSAECSIHLEVIVDRPLQVFHVNVEVKDINDNPPVFSLREQKLLIAESKQSDSRFPLEGASDADIEENALLTYRLSKNEYFSLDSPTNGKQIKRLSLILKKSLDREKTPELNLLLTATDGGKPELTGTVRLLVQVLDVNDNDPEFDKSEYKVSLMENAAKETLVLKLNATDRDEGVNGEVTYSLMSIKPNGRHLFTLDQNNGEVRVNGTLDYEENKFYKIEVQATDKGTPPMAGHCTVWVEILDTNDNSPEVAVTSLSLPVREDAQPSTVIALISVSDRDSGVNGQVTCSLTPHVPFKLVSTFKNYYSLVLDSALDRENVWAYELVVTARDGGSPSLWATARVSVEVADVNDNAPAFAQPEYTVFVKENNPPGCHIFTVSARDADAQENALVSYSLVERRLGDRALSSYVSVHAESGKVYALQPLDHEELELLQFQVSARDAGVPPLSSNVTLQVFVLDENDNAPALLATQAGSAGGAVNKLVPRSVGAGHVVAKVRAVDADSGYNAWLSYELQPAAGGSRIPFRVGLYTGEISTTRALDEADSPRHRLLVLVKDHGEPALTATATVLVSLVESGQAPKASSRTLAGAASPEAALVDVNVYLIIAICVVSSLLVLTLLLYTALWWSATPTEGACAPGKPTLVCSRAVGSWSYSQQRRQRVCSEEGPPKTDLMAFSPSLPLGLNKEEEGERQEPGSNHPGQPRQPNPDWRYSASLRAGMHSSVHLEEAGILRAGPGGPDQQWPTVSSATPEPEAGEVSPPVGAGVNSNSWTFKYGPGNPKQSGPGELPDKFIIPGSPAIISIRQEPTNSQIDKSDFITFGKKEETKKKKKKKKGNKTQEKKEKGNSTTDNSDQ

SEQ ID NO: 636 - protein, 941 aa, Homo sapiens
MVIIGPRGPGSQRLLLSLLLLAAWEVGSGQLHYSVYEEAKHGTFVGRIAQDLGLELAELVPRLFRVASKRHGDLLEVNLQNGILFVNSRIDREKLCGRSAECSIHLEVIVDRPLQVFHVDVEVKDINDNPPVFREREQKVPVSESAPLDSHFPLEGASDADIGVNSLLTYALSLNENFELKIKTKKDKSILPELVLRKLLDREQTPKLNLLLMVIDGGKPELTGSVQIQITVLDVNDNGPAFDKPSYKVVLSENVQNDTRVIQLNASDPDEGLNGEISYGIKMILPVSEKCMFSINPDTGEIRIYGELDFEENNAYEIQVNAIDKGIPSMAGHSMVLVEVLDVNDNVPEVMVTSLSLPVQEDAQVGTVIALISVSDRDSGANGQVICSLTPHVPFKLVSTYKNYYSLVLDSALDRESVSAYELVVTARDGGSPSLWATARVSVEVADVNDNAPAFAQPEYTVFVKENNPPGCHIFTVSAWDADAQKNALVSYSLVERRVGEHALSSYVSVHAESGKVYALQPLDHEELELLQFQVSARDAGVPPLGSNVTLQVFVLDENDNAPALLATPAGSAGGAVSELVPRSVGAGHVVAKVRAVDADSGYNAWLSYELQPAAVGAHIPFHVGLYTGEISTTRILDEADAPRHRLLVLVKDHGEPALTSTATVLVSLVENGQAPKTSSRASVGAVDPEAALVDINVYLIIAICAVSSLLVLTLLLYTALRCSAPPTVSRCAPGKPTLVCSSAVGSWSYSQQRRQRVCSAESPPKTDLMAFSPSLQLSREDCLNPPSEPRQPNPDWRYSASLRAGMHSSVHLEEAGILRAGPGGPDQQWPTVSSATPEPEAGEVSPPVGAGVNSNSWTFKYGPGNPKQSGPGELPDKFIIPGSPAIISIRQEPTNSQIDKSDFITFGKKEETKKKKKKKKGNKTQEKKEKGNSTTDNSDQ

SEQ ID NO: 637 - protein, 950 aa, Homo sapiens
MLSSWQGGPRPRQLLLWLLILAAWETGSGQLHYSVPEEAKHGTFVGRIAQDLGLELAELVPRLFRVASKRHGDLLEVNLQNGILFVNSRIDREELCGRSAECSIHLEVIVDRPLQVFHVEVKVRDINDNPPIFPESKKRIIIAESRPPETRFPLDGASDADIGVNSALTYRLDPNDYFTLDAQNSLEQMSSLSLVLRKTLDREEIQEHSLLLTASDGGKPELTGTVQLLITILDVNDNAPEFYQSVYKVTVLENAFNGTLVIKLNATDPDDGTNGDIVYSFRRPVWPAVVYAFTINPNNGEIRTKGKLDFEEKKLYEISVEAVDKGNIPMAGHCTLLVEVLDVNDNAPEVTITSLSLPIREDTQPSAIIALISVSDRDSGSNGQVTCTLTPHVPFKLVSTYKNYYSLVLDSALDRESVSAYELVVTARDGGSPSLWATASVSVGVADVNDNAPAFAQPEYTVFVKENNPPGCHIFTVSAQDADAQENALVSYSLVERRVGERALSSYVSVHAESGKVYALQPLDHEELELLQFQVSARDSGVPPLGSNVTLQVFVLDENDNAPALLTPGAGSAGGTVSELMPRSVGAGHVVAKVRAVDADSGYNAWLSYELQLAAVGARIPFRVGLYTGEISTTRPLDEVDAPHHRLLVLVKDHGEPALTATATVLLSLVESGQAPQASSRASAGAVGPEAALVDVNVYLIIAICAVSSLLVLTLLLYTALRCSAPPTEGACAPGKPTLVCSSAAGSWSYSQQRRPRVCSGEGPHKTDLMAFSPSLPPCLGSAEGTGQREEDSECLKEPRQPNPDWRYSASLRAGMHSSVHLEEAGILRAGPGGPDQQWPTVSSATPEPEAGEVSPPVGAGVNSNSWTFKYGPGNPKQSGPGELPDKFIIPGSPAIISIRQEPTNSQIDKSDFITFGKKEETKKKKKKKKGNKTQEKKEKGNSTTDNSDQ

SEQ ID NO: 638 - protein, 948 aa, Homo sapiens
MASSIRRGRGAWTRLLSLLLLAAWEVGSGQLRYSVPEEAKHGTFVGRIAQDLGLELEELVPRLFRVASKRHGDLLEVNLQNGILFVNSRIDREELCGRSAECSIHVEVIVDRPLQVFHVEVEVKDINDNPPIFPMTVKTIRFPESRLLDSRFPLEGASDADIGVNALLSYKLSSSEFFFLDIQANDELSESLSLVLGKSLDREETAEVNLLLVATDGGKPELTGTVQILIKVLDVNDNEPTFAQSVYKVKLLENTANGTLVVKLNASDADEGPNSEIVYSLGSDVSSTIQTKFTIDPISGEIRTKGKLDYEEAKSYEIQVTATDKGTPSMSGHCKISLKLVDINDNTPEVSITSLSLPISENASLGTVIALITVSDRDSGTNGHVTCSLTPHVPFKLVSTFKNYYSLVLDSALDRESVSAYELVVTARDGGSPSLWATTSVSIEVADVNDNAPAFAQPEYTVFVKENNPPGCHIFTVSAWDADAQENALVSYSLVERRVGERALSSYVSVHAESGKVYALQPLDHEEVELLQFQVSARDAGVPPLGSNVTLQVFVLDENDNAPALLAPRAGTAAGAVSELVPWSVGAGHVVAKVRAVDADSGYNAWLSYELQLGTGSARIPFRVGLYTGEISTTRALDEADSPRHRLLVLVKDHGEPALTATATVLVSLVESGQAPKASSRAWVGAAGSEATLVDVNVYLIIAICAVSSLLVLTVLLYTALRCSVPPTEGARAPGKPTLVCSSAVGSWSYSQQRRQRVCSGEDPPKTDLMAFSPSLSQGPDSAEEKQLSESEYVGKPRQPNPDWRYSASLRAGMHSSVHLEEAGILRAGPGGPDQQWPTVSSATPEPEAGEVSPPVGAGVNSNSWTFKYGPGNPKQSGPGELPDKFIIPGSPAIISIRQEPTNSQIDKSDFITFGKKEETKKKKKKKKGNKTQEKKEKGNSTTDNSDQ

SEQ ID NO: 639 - protein, 950 aa, Homo sapiens
MLFSWREDPGAQCLLLSLLLLAASEVGSGQLHYSVSEEAKHGTFVGRIAQDLGLELAELVPRLFRVASKRHGDLLEVNLQNGILFVNSRIDREELCGRSAECSIHLEVIVDRPLQVFHVEVEVKDINDNAPVFPMAVKNLFISESRQPGSRFSLEGASDADIGTNSLLTYSLDSTEYFTLDVKRNDEEIKSLGLVLKKNLNREDTPKHYLLITAIDGGKPELTGTTQLKITVLDVNDNAPAFERTIYKVRLLENAPNGTLVVTVNATDLDEGVNKDIAYSFNTDMSADILSKFHLDPVNGQISVKGNIDFEESKSYEIQVEATDKGNPPMSDHCTVLLEIVDINDNVPELVIQSLSLPVLEDSPLSTVIALISVSDRDSGVNGQVTCSLTPHVPFKLVSTFKNYYSLVLDSPLDRESVSAYELVVTARDGGSPSLWATASVSVEVADVNDNAPAFSQSEYTVFVKENNPPGCHIFTVSARDADAQENALVSYSLVERRVGERALSSYVSVHAESGKVYALQPLDHEELELLQFQVSARDAGVPPLGSNVTLQVFVLDENDNAPALLMPRVGGIGGAVSELVPRSVGAGHVVAKVRAVDADSGYNAWLSYELQPGTGGARIPFRVGLYTGEISTTRALDEVDAPRHRLLVLVKDHGEPSLTATATVLVSLVESGQAPKASSQASAGATGPEAALVDVNVYLIVAICAVSSLLVLTLLLYTALRCSAPPTEGDCGPGKPTLVCSSAVGSWSYSQQRQQRVCSGEGLPKTDLMAFSPSLPPCPISRDREEKQDVDVDLSAKPRQPNPDWRYSASLRAGMHSSVHLEEAGILRAGPGGPDQQWPTVSSATPEPEAGEVSPPVGAGVNSNSWTFKYGPGNPKQSGPGELPDKFIIPGSPAIISIRQEPTNSQIDKSDFITFGKKEETKKKKKKKKGNKTQEKKEKGNSTTDNSDQ

SEQ ID NO: 640 - protein, 947 aa, Homo sapiens
MEFSWGSGQESRRLLLLLLLLAAWEAGNGQLHYSVSEEAKHGTFVGRIAQDLGLELAELVPRLFRVASKGRGGLLEVNLQNGILFVNSRIDREELCRRSAECSIHLEVIVDRPLQVFHVDVEVRDINDNPPVFPATQKNLSIAESRPLDSRFPLEGASDADIGENALLTYRLSPNEYFSLEKPPDDELVKGLGLILRKSLDREEAPEIFLVLTATDGGKPELTGTVQLLITVLDANDNAPAFDRTIYKVRLLENVPNGTLVIKLNASDLDEGLNGDIVYSFSNDISPNVKSKFHIDPITGQIIVKGYIDFEESKSYEIIVEGIDKGQLPLSGHCRVIVEVEDNNDNVPDLEFKSLSLPIREDAPLGTVIALISVSDKDMGVNGLVTCSLTSHVPFKLVSTFKNYYSLVLDSALDRESVSAYELVVTARDGGSPSLWATASVSVEVADVNDNAPAFAQPEYTVFVKENNPPGCHIFTVSAWDADAQENALVSYSLVERRVGERALSSYVSVHAESGKVYALQPLDHEELELLQFQVTARDAGVPPLGSNVTLQVFVLDENDNAPALLAPRAGGTGGAVSELVPWSVGVGHVVAKVRAVDADSGYNAWLSYELQPGTGGARIPFRVGLYTGEISTTRALDETDAPRHRLLVLVKDHGEPALTATATVLVSLVESGQAPKASSRALVGAVGPDAALVDVNVYLIIAICAVSSLLVLTLLLYTALRCSALPTEGACAPGKPTLVCSSAVGSWSYSQQRRPRVCSGEGPPKTDLMAFSPSLPDSRDREDQLQTTEESFAKPRQPNPDWRYSASLRAGMHSSVHLEEAGILRAGPGGPDQQWPTVSSATPEPEAGEVSPPVGAGVNSNSWTFKYGPGNPKQSGPGELPDKFIIPGSPAIISIRQEPTNSQIDKSDFITFGKKEETKKKKKKKKGNKTQEKKEKGNSTTDNSDQ

SEQ ID NO: 641 - protein, 936 aa, Homo sapiens
MVYSRRGSLGSRLLLLWLLLAYWKAGSGQLHYSIPEEAKHGTFVGRIAQDLGLELAELVPRLFRVASKGRGDLLEVNLQNGILFVNSRIDREELCRRRAECSIHLEVIVDRPLQVFHVEVAVKDINDNPPRFSRQEQRLFILESRMPDSRFPLEGASDLDIGANAQLRYRLNPNEYFDLDVKTNEEETNFLELVLRKSLDREETQEHRLLVIATDGGKPELTGTVQLLINVLDANDNAPEFDKSIYNVRLLENAPSGTLVIKLNASDADEGINKEIVYFFSNLVLDDVKSKFIINSNTGEIKVNGELDYEDYNSYEINIDAMDKSTFPLSGHCKVVVKLLDVNDNTPEMAITTLFLPVKEDAPLSTVIALISVSDRDSGANGQVTCSLMPHVPFKLVSTFKNYYSLVLDSALDRESVSVYELVVTARDGGSPSLWATASVSVEVADVNDNAPAFAQPQYTVFVKENNPPGCHIFTVSARDADAQENALVSYSLVERRVGERPLSSYVSVHAESGKVYALQPLDHEEVELLQFQVSARDAGVPPLGSNVTLQVFVLDENDNAPALLVPRVGGTGGAVSELVPRSVGAGHVVAKVRAVDPDSGYNAWLSYELQPAPGSARIPFRVGLYTGEISTTRSLDETEAPRHRLLVLVKDHGEPPLTATATVLVSLVESGQAPKASSRASAGAVGPEAALVDVNVYLIIAICAVSSLLVLTLLLYTALRCSAQPTEAVCTRGKPTLLCSSAVGSWSYSQQRRQRVCSGEAPPKTDLMAFSPSLPQGPTSTDNPRQPNPDWRYSASLRAGMHSSVHLEEAGILRAGPGGPDQQWPTVSSATPEPEAGEVSPPVGAGVNSNSWTFKYGPGNPKQSGPGELPDKFIIPGSPAIISIRQEPTNSQIDKSDFITFGKKEETKKKKKKKKGNKTQEKKEKGNSTTDNSDQ

SEQ ID NO: 642 - protein, 950 aa, Homo sapiens
MVFTPEDRLGKQCLLLPLLLLAAWKVGSGQLHYSVPEEAKHGTFVGRIAQDLGLELAELVPRLFRMASKDREDLLEVNLQNGILFVNSRIDREELCGRSAECSIHLEVIVDRPLQVFHVDVEVRDINDNPPLFPVEEQRVLIYESRLPDSVFPLEGASDADVGSNSILTYKLSSSEYFGLDVKINSDDNKQIGLLLKKSLDREEAPAHNLFLTATDGGKPELTGTVQLLVTVLDVNDNAPTFEQSEYEVRIFENADNGTTVIRLNASDRDEGANGAISYSFNSLVAAMVIDHFSIDRNTGEIVIRGNLDFEQENLYKILIDATDKGHPPMAGHCTVLVRILDKNDNVPEIALTSLSLPVREDAQFGTVIALISVNDLDSGANGQVNCSLTPHVPFKLVSTFKNYYSLVLDSALDRESVSAYELVVTARDGGSPSLWATASLSVEVADMNDNAPAFAQPEYTVFVKENNPPGCHIFTVSARDADAQENALVSYSLVERRVGERALSSYISVHAESGKVYALQPLDHEELELLQFQVSARDAGVPPLGSNVTLQVFVLDENDNAPALLAPRVGGTGGAVSELVPRSLGAGQVVAKVRAVDADSGYNAWLSYELQPPASSARFPFRVGLYTGEISTTRVLDEADSPRHRLLVLVKDHGEPALTATATVLVSLVESGQAPKASSRASVGAAGPEAALVDVNVYLIIAICAVSSLLVLTLLLYTALRCSAPPTEGACTADKPTLVCSSAVGSWSYSQQRRQRVCSGEGPPKMDLMAFSPSLSPCPIMMGKAENQDLNEDHDAKPRQPNPDWRYSASLRAGMHSSVHLEEAGILRAGPGGPDQQWPTVSSATPEPEAGEVSPPVGAGVNSNSWTFKYGPGNPKQSGPGELPDKFIIPGSPAIISIRQEPTNSQIDKSDFITFGKKEETKKKKKKKKGNKTQEKKEKGNSTTDNSDQ

SEQ ID NO: 643 - protein, 937 aa, Homo sapiens
MVCPNGYDPGGRHLLLFIIILAAWEAGRGQLHYSVPEEAKHGNFVGRIAQDLGLELAELVPRLFRAVCKFRGDLLEVNLQNGILFVNSRIDREELCGRSAECSIHLEVIVERPLQVFHVDVEVKDINDNPPVFPATQRNLFIAESRPLDSRFPLEGASDADIGENALLTYRLSPNEYFFLDVPTSNQQVKPLGLVLRKLLDREETPELHLLLTATDGGKPELTGTVQLLITVLDNNDNAPVFDRTLYTVKLPENVSIGTLVIHPNASDLDEGLNGDIIYSFSSDVSPDIKSKFHMDPLSGAITVIGHMDFEESRAHKIPVEAVDKGFPPLAGHCTVLVEVVDVNDNAPQLTLTSLSLPIPEDAQPGTVITLISVFDRDFGVNGQVTCSLTPRVPFKLVSTFKNYYSLVLDSALDRESVSAYELVVTARDGGSPSLWATASVSVEVADVNDNAPAFAQPEYTVFVKENNPPGCHIFTVSAGDADAQKNALVSYSLVELRVGERALSSYVSVHAESGKVYALQPLDHEELELLQFQVSARDAGVPPLGSNVTLQVFVLDENDNAPALLAPRVGGTGGAVRELVPRSVGAGHVVAKVRAVDADSGYNAWLSYELQPVAAGASIPFRVGLYTGEISTTRALDETDAPRHRLLVLVKDHGEPSLTATATVLVSLVESGQAPKASSRASLGIAGPETELVDVNVYLIIAICAVSSLLVLTLLLYTALRCSAPSSEGACSLVKPTLVCSSAVGSWSFSQQRRQRVCSGEGPPKTDLMAFSPSLPQGPSSTDNPRQPNPDWRYSASLRAGMHSSVHLEEAGILRAGPGGPDQQWPTVSSATPEPEAGEVSPPVGAGVNSNSWTFKYGPGNPKQSGPGELPDKFIIPGSPAIISIRQEPTNSQIDKSDFITFGKKEETKKKKKKKKGNKTQEKKEKGNSTTDNSDQ

SEQ ID NO: 644 - protein, 950 aa, Homo sapiens
MDYHWRGELGSWRLLLLLLLLAAWKVGSGQLHYSVPEEAKHGTFVGRIAQDLGLELAELVPRLFRVASKRHRDLLEVSLQNGILFVNSRIDREELCGRSAECSIHLEVIVDRPLQVFHVDVEVKDVNDNPPVFRVKDQKLFVSESRMPDSRFPLEGASDADVGANSVLTYRLSSHDYFMLDVNSKNDENKLVELVLRKSLDREDAPAHHLFLTATDGGKPELTGTVQLLVTVLDVNDNAPTFEQSEYEVRIFENADNGTTVIKLNASDPDEGANGAISYSFNSLVETMVIDHFSIDRNTGEIVIRGNLDFEQENLYKILIDATDKGHPPMAGHCTVLVRILDKNDNVPEIALTSLSLPVREDAQFGTVIALISVNDLDSGANGQVTCSLMPHVPFKLVSTFKNYYSLVLDSALDRERVSAYELVVTARDGGSPSLWATASLSVEVADVNDNAPAFAQPEYTVFVKENNPPGCHIFTVSARDADAQENALVSYSLVERRVGERSLSSYISVHTESGKVYALQPLDHEELELLQFQVSARDAGVPPLGSNVTLQVFVLDENDNAPALLEPRVGGTGGAASKLVPRSVGAGHVVAKVRAVDADSGYNAWLSYELQPAASSPRIPFRVGLYTGEISTTRVLDEADSPRHRLLVLVKDHGEPALTATATVLVSLVESGQAPKASSRQSAGVLGPEAALVDVNVYLIIAICAVSSLLVLTLLLYTALRCSALPTEGGCRAGKPTLVCSSAVGSWSYSQQQPQRVCSGEGPPKTDLMAFSPCLPPDLGSVDVGEEQDLNVDHGLKPRQPNPDWRYSASLRAGMHSSVHLEEAGILRAGPGGPDQQWPTVSSATPEPEAGEVSPPVGAGVNSNSWTFKYGPGNPKQSGPGELPDKFIIPGSPAIISIRQEPTNSQIDKSDFITFGKKEETKKKKKKKKGNKTQEKKEKGNSTTDNSDQ

SEQ ID NO: 645 - protein, 950 aa, Homo sapiens
MLYSSRGDPEGQPLLLSLLILAMWVVGSGQLHYSVPEEAEHGTFVGRIAQDLGLELAELVPRLFQLDSKGRGDLLEVNLQNGILFVNSRIDREELCGRSAECSIHLEVIVDRPLQVFHVDVEVKDINDNPPVFPATQKNLFIAESRPLDSRFPLEGASDADIGENALLTYRLSPNEYFFLDVPTSNQQVKPLGLVLRKLLDREETPELHLLLTATDGGKPELTGTVQLLITVLDNNDNAPVFDRTLYTVKLPENVSIGTLVIHPNASDLDEGLNGDIIYSFSSDVSPDIKSKFHMDPLSGAITVIGHMDFEESRAHKIPVEAVDKGFPPLAGHCTLLVEVVDVNDNAPQLTIKTLSVPVKEDAQLGTVIALISVIDLDADANGQVTCSLTPHVPFKLVSTYKNYYSLVLDRALDRESVSAYELVVTARDGGSPSLWATARVSVEVADVNDNAPAFAQSEYTVFVKENNPPGCHIFTVSARDADAQENALVSYSLVERRLGERSLSSYVSVHAESGKVYALQPLDHEELELLQFQVSARDAGVPPLGSNVTLQVFVLDENDNAPALLTPRMRGTDGAVSEMVLRSVGAGVVVGKVRAVDADSGYNAWLSYELQPETASASIPFRVGLYTGEISTTRALDETDAPRQRLLVLVKDHGEPALTATATVLVSLVESGQAPKSSSRASVGATGPEVTLVDVNVYLIIAICAVSSLLVLTLLLYTVLRCSAMPTEGECAPGKPTLVCSSAVGSWSYSQQRRQRVCSGEGKQKTDLMAFSPGLSPCAGSTERTGEPSASSDSTGKPRQPNPDWRYSASLRAGMHSSVHLEEAGILRAGPGGPDQQWPTVSSATPEPEAGEVSPPVGAGVNSNSWTFKYGPGNPKQSGPGELPDKFIIPGSPAIISIRQEPTNSQIDKSDFITFGKKEETKKKKKKKKGNKTQEKKEKGNSTTDNSDQ

SEQ ID NO: 646 - protein, 963 aa, Homo sapiens
MVGCGVAVLCLWVSCGAAAGQLEYSVPEETERGVAVGNLSADLRLPAAAMSSRNFRFLSSHRELYFGVDLPSGNLVVREPADREQLCRAKAACVLTYDLVLEDPLELHKIRIHVLDTNDNSPLFPAGDVQLHIPEFLTPGARFTLPNAQDDDEGSNGILSYSLSPSQHFRLDMGSRVDGSEYPELVLEKALDREQRATHLLVLTARDGGLPARSGDAQVTIIVVDTNDNAPVFERSVYRTKVPETAPNGTVLFRVQALDPDEGSNGEVQYSLSNSTQAELRHRFHVHPKSGEVQVAASLGPPETLLEAYIEARDEGVFGLASTAKLLVEVTDVNDHAPELDFLTLSNPVPEDAAPGTVIALFSVKDEDLDSNGRVICGMSSAGPFQLTASFDNYYSLLIDGPLDREQISEYQVLITASDSGSPPLSTRRTITVSVADVNDNTPNFPQPQQELFVAENNGPGASLGRVFAQDPDLGKNGLVSYELLDVISEGPSASSLLAVESSSGAITAKTSFDFEQLRGFHFQVEGRDGGIPPRSATVTINLFVVDRNDNYPVILFPLPRNGSVPVEIVPRSARTGHLVTKVVAEDADSGSNAWLSYHISRASDSSLFRISANIGELRTARLVLPTDAVKQRVVVVVRDHGDPPLSSSVTLGVLLSNSVPQLLPDFEDVWEPGGQLSAQNLYLVIALACISFLFLGCLLFFVCTKLHQSPGCCAQSCCRSTEDLRYGSKMVSNPCMTSATIDVTTVERLSQTYLYRASLGLGSDNNSLLLRGEYNAADLRNLATGVGLNLPISCIQIRNRKGDHANVNAMPRQPNPDWRYSASLRAGMHSSVHLEEAGILRAGPGGPDQQWPTVSSATPEPEAGEVSPPVGAGVNSNSWTFKYGPGNPKQSGPGELPDKFIIPGSPAIISIRQEPTNSQIDKSDFITFGKKEETKKKKKKKKGNKTQEKKEKGNSTTDNSDQ

SEQ ID NO: 647 - protein, 1007 aa, Homo sapiens
MEQAGTRPAATEHPRLRRPMPWLLLLPLLLLLLLLLPGPAASQLRYSVPEEQAPGALVGNVARALGLELRRLGPGCLRINHLGAPSPRYLELDLTSGALFVNERIDREALCEQRPRCLLSLEVLAHNPVAVSAVEVEILDINDNSPRFPRPNYQLQVSESVAPGARFHIESAQDPDVGANSVQTYELSPSEHFELDLKPLQENSKVLELVLRKGLDREQAALHHLVLTAVDGGIPARSGTAQISVRVLDTNDNSPAFDQSTYRVQLREDSPPGTLVVKLNASDPDEGSNGELRYSLSSYTSDRERQLFSIDASTGEVRVIGGLDYEEASSYQIYVQATDRGPVPMAGHCKVLVDIVDVNDNAPEVVLTDLYSPVPENATPNTIVAVLSVNDQDSGPNRKVSLGLEATLPFRLNGFGNSYTLVVSGPLDRERVAVYNITVTATDGGIPQLTSLRTLKVEISDINDNPPSFLEDSYSIYIQENNLPGVLLCTVQATDPDEKENAEVTYSLLEREIQGLPVTSYVSINSASGSLYAVNSFDYEKFREFFVTVEAQDKGSPPLSSTVTANVYVVDMNDHAPHILYPTSTNSSAAFEMVPRTAPAGYLVTKVIAMDSDSGQNAWLFYHLAQTSDLDLFKVELHTGEIRTTRKMGDESGSTFNLTVVVRDNGEPSLSASVAITVAVVDRVSKILPDTQRHVKSPRTYSEITLYLIIALSTVSFIFLLTIIILSIIKCYRYTAYGTACCGGFCGVRERSPAELYKQANNNIDARIPHGLKVQPHFIEVRGNGSLTKTYCYKACLTAGSGSDTFMFYNTGAQTGPGPSGAQAAVTDSRNLTGQSGQNAGNLIILKNEAVSQNEPRQPNPDWRYSASLRAGMHSSVHLEEAGILRAGPGGPDQQWPTVSSATPEPEAGEVSPPVGAGVNSNSWTFKYGPGNPKQSGPGELPDKFIIPGSPAIISIRQEPTNSQIDKSDFITFGKKEETKKKKKKKKGNKTQEKKEKGNSTTDNSDQ

SEQ ID NO: 648 - protein, 935 aa, Homo sapiens
MANRLQRGDRSRLLLLLCIFLGTLRGFRARQIRYSVPEETEKGSFVGNISKDLGLEPRELAKRGVRIVSRGKTQLFAVNPRSGSLITAGRIDREELCETVSSCFLNMELLVEDTLKIYGVEVEIIDINDNAPSFQEDEVEIKVSEHAIPGARFALPNARDPDVGVNSLQSYQLSPNNYFSLQLRGRTDGAKNPELVLEGSLDREKEAAHLLLLTALDGGDPIRKGAVPIRVVVLDVNDHIPMFTQSVYRVSVPENISSGTRVLMVNATDPDEGINGEVMYSFRNMESKASEIFQLDSQTGEVQVRGSLDFEKYRFYEMEIQGQDGGGLFTTTTMLITVVDVNDNAPEITITSSINSILENSPPGTVIALLNVQDQDSGENGQVSCFIPNHLPFKLEKTYGNYYKLITSRVLDRELVQSYNITLTATDQGSPPLSAETHVWLNVADDNDNPPVFPHSSYSAYIPENNPRGASIFSVTALDPDSKQNALVTYSLTDDTVQGVPLSSYVSINSNTGVLYALQSFDYEQFRDLELRVIARDSGDPPLSSNVSLSLFVLDQNDNAPEILYPALPTDGSTGVELAPRSAEPGYLVTKVVAVDKDSGQNAWLSYRLLKASEPGLFAVGEHTGEVRTARALLDRDALKQSLVVAVQDHGQPPLSATVTLTVAVADSIPEVLADLGSLESLANSETSDLSLYLVVAVAAVSCIFLVFVIVLLALRLWRWHKSRLLQASEGGLAGMPTSHFVGVDGVQAFLQTYSHEVSLIADSQKSHLIFPQPNYGDTLISQESCEKSEPLLIAEDSAIILGKCDPTSNQQAPPNTDWRFSQAQRPGTSGSQNGDDTGTWPNNQFDTEMLQAMILASASEAADGSSTLGGGAGTMGLSARYGPQFTLQHVPDYRQNVYIPGSNATLTNAAGKRDGKAPAGGNGNKKKSGKKEKK

SEQ ID NO: 649 - protein, 769 aa, Homo sapiens
MTDAGNRKEGFKKCRSATFSIDGYSFTIVANEAGDKNARPLARFSRSKSQNCLWNSLIDGLTGNVKEKPRPTIVHDPRPPEEILADELPQLDSSEVLVKTSFRLRSLVKQLERGEASVVDLKKNLEYAATVLESVYIDETRRLLDTEDELSDIQSDAVPSEVRDWLASTFTRQMGMMLRRSDEKPRFKSIVHAVQAGIFVERMYRRTSNMVGLSYPPAVIEALKDVDKWSFDVFSLNEASGDHALKFIFYELLTRYDLISRFKIPISALVSFVEALEVGYSKHKNPYHNLMHAADVTQTVHYLLYKTGVANWLTELEIFAIIFSAAIHDYEHTGTTNNFHIQTRSDPAILYNDRSVLENHHLSAAYRLLQDDEEMNILINLSKDDWREFRTLVIEMVMATDMSCHFQQIKAMKTALQQPEAIEKPKALSLMLHTADISHPAKAWDLHHRWTMSLLEEFFRQGDREAELGLPFSPLCDRKSTMVAQSQVGFIDFIVEPTFTVLTDMTEKIVSPLIDETSQTGGTGQRRSSLNSISSSDAKRSGVKTSGSEGSAPINNSVISVDYKSFKATWTEVVHINRERWRAKVPKEEKAKKEAEEKARLAAEEQQKEMEAKSQAEEGASGKAEKKTSGETKNQVNGTRANKSDNPRGKNSKAEKSSGEQQQNGDFKDGKNKTDKKDHSNIGNDSKKTDGTKQRSHGSPAPSTSSTCRLTLPVIKPPLRHFKRPAYASSSYAPSVSKKTDEHPARYKMLDQRIKMKKIQNISHNWNRK

SEQ ID NO: 650 - protein, 886 aa, Homo sapiens
MEPPTVPSERSLSLSLPGPREGQATLKPPPQHLWRQPRTPIRIQQRGYSDSAERAERERQPHRPIERADAMDTSDRPGLRTTRMSWPSSFHGTGTGSGGAGGGSSRRFEAENGPTPSPGRSPLDSQASPGLVLHAGAATSQRRESFLYRSDSDYDMSPKTMSRNSSVTSEAHAEDLIVTPFAQVLASLRSVRSNFSLLTNVPVPSNKRSPLGGPTPVCKATLSEETCQQLARETLEELDWCLEQLETMQTYRSVSEMASHKFKRMLNRELTHLSEMSRSGNQVSEYISTTFLDKQNEVEIPSPTMKEREKQQAPRPRPSQPPPPPVPHLQPMSQITGLKKLMHSNSLNNSNIPRFGVKTDQEELLAQELENLNKWGLNIFCVSDYAGGRSLTCIMYMIFQERDLLKKFRIPVDTMVTYMLTLEDHYHADVAYHNSLHAADVLQSTHVLLATPALDAVFTDLEILAALFAAAIHDVDHPGVSNQFLINTNSELALMYNDESVLENHHLAVGFKLLQEDNCDIFQNLSKRQRQSLRKMVIDMVLATDMSKHMTLLADLKTMVETKKVTSSGVLLLDNYSDRIQVLRNMVHCADLSNPTKPLELYRQWTDRIMAEFFQQGDRERERGMEISPMCDKHTASVEKSQVGFIDYIVHPLWETWADLVHPDAQEILDTLEDNRDWYYSAIRQSPSPPPEEESRGPGHPPLPDKFQFELTLEEEEEEEISMAQIPCTAQEALTAQGLSGVEEALDATIAWEASPAQESLEVMAQEASLEAELEAVYLTQQAQSTGSAPVAPDEFSSREEFVVAVSHSSPSALALQSPLLPAWRTLSVSEHAPGLPGLPSTAAEVEAQREHQAAKRACSACAGTFGEDTSALPAPGGGGSGGDPT

SEQ ID NO: 651 - protein, 736 aa, Homo sapiens
MKKSRSVMTVMADDNVKDYFECSLSKSYSSSSNTLGIDLWRGRRCCSGNLQLPPLSQRQSERARTPEGDGISRPTTLPLTTLPSIAITTVSQECFDVENGPSPGRSPLDPQASSSAGLVLHATFPGHSQRRESFLYRSDSDYDLSPKAMSRNSSLPSEQHGDDLIVTPFAQVLASLRSVRNNFTILTNLHGTSNKRSPAASQPPVSRVNPQEESYQKLAMETLEELDWCLDQLETIQTYRSVSEMASNKFKRMLNRELTHLSEMSRSGNQVSEYISNTFLDKQNDVEIPSPTQKDREKKKKQQLMTQISGVKKLMHSSSLNNTSISRFGVNTENEDHLAKELEDLNKWGLNIFNVAGYSHNRPLTCIMYAIFQERDLLKTFRISSDTFITYMMTLEDHYHSDVAYHNSLHAADVAQSTHVLLSTPALDAVFTDLEILAAIFAAAIHDVDHPGVSNQFLINTNSELALMYNDESVLENHHLAVGFKLLQEEHCDIFMNLTKKQRQTLRKMVIDMVLATDMSKHMSLLADLKTMVETKKVTSSGVLLLDNYTDRIQVLRNMVHCADLSNPTKSLELYRQWTDRIMEEFFQQGDKERERGMEISPMCDKHTASVEKSQVGFIDYIVHPLWETWADLVQPDAQDILDTLEDNRNWYQSMIPQSPSPPLDEQNRDCQGLMEKFQFELTLDEEDSEGPEKEGEGHSYFSSTKTLCVIDPENRDSLGETDIDIATEDKSPVDT

SEQ ID NO: 652 - protein, 769 aa, Homo sapiens
MGCNMCVVQKPEEQYKVMLQVNGKELSKLSQEQTLQALRSSKEPLVIQVLRRSPRLRGDSSCHDLQLVDSGTQTDITFEHIMALGKLRPPTPPMVILEPPPISHEYYDPAEFMEGGPQEADRLDELEYEEVELYKSSHRDKLGLMVCYRTDDEEDLGIYVGEVNPNSIAAKDGRIREGDRIIQINGVDVQNREEAVAILSQEENTNISLLVARPESQLAKRWKDSDRDDFLDDFGSENEGELRARKLKSPPAQQPGNEEEKGAPDAGPGLSNSQELDSGVGRTDESTRNEESSEHDLLGDEPPSSTNTPGSLRKFGLQGDALQSRDFHFSMDSLLAEGAGLGGGDVPGLTDEEYERYRELLEIKCHLENGNQLGLLFPRASGGNSALDVNRNESLGHEMAMLEEELRHLEFKCRNILRAQKMQQLRERCMKAWLLEEESLYDLAASEPKKHELSDISELPEKSDKDSTSAYNTGESCRSTPLLVEPLPESPLRRAMAGNSNLNRTPPGPAVATPAKAAPPPGSPAKFRSLSRDPEAGRRQHAEERGRRNPKTGLTLERVGPESSPYLSRRHRGQGQEGEHYHSCVQLAPTRGLEELGHGPLSLAGGPRVGGVAAAATEAPRMEWKVKVRSDGTRYVAKRPVRDRLLKARALKIREERSGMTTDDDAVSEMKMGRYWSKEERKQHLIRAREQRKRREFMMQSRLECLREQQNGDSKPELNIIALSHRKTMKKRNKKILDNWITIQEMLAHGARSADGKRVYNPLLSVTTV

SEQ ID NO: 653 - protein, 303 aa, Homo sapiens
MASWAKGRSYLAPGLLQGQVAIVTGGATGIGKAIVKELLELGSNVVIASRKLERLKSAADELQANLPPTKQARVIPIQCNIRNEEEVNNLVKSTLDTFGKINFLVNNGGGQFLSPAEHISSKGWHAVLETNLTGTFYMCKAVYSSWMKEHGGSIVNIIVPTKAGFPLAVHSGAARAGVYNLTKSLALEWACSGIRINCVAPGVIYSQTAVENYGSWGQSFFEGSFQKIPAKRIGVPEEVSSVVCFLLSPAASFITGQSVDVDGGRSLYTHSYEVPDHDNWPKGAGDLSVVKKMKETFKEKAKL

SEQ ID NO: 654 - protein, 1290 aa, Homo sapiens
MSGPLEGADGGGDPRPGESFCPGGVPSPGPPQHRPCPGPSLADDTDANSNGSSGNESNGHESRGASQRSSHSSSSGNGKDSALLETTESSKSTNSQSPSPPSSSIAYSLLSASSEQDNPSTSGCSSEQSARARTQKELMTALRELKLRLPPERRGKGRSGTLATLQYALACVKQVQANQEYYQQWSLEEGEPCSMDMSTYTLEELEHITSEYTLQNQDTFSVAVSFLTGRIVYISEQAAVLLRCKRDVFRGTRFSELLAPQDVGVFYGSTAPSRLPTWGTGASAGSGLRDFTQEKSVFCRIRGGPDRDPGPRYQPFRLTPYVTKIRVSDGAPAQPCCLLIAERIHSGYEAPRIPPDKRIFTTRHTPSCLFQDVDERAAPLLGYLPQDLLGAPVLLFLHPEDRPLMLAIHKKILQLAGQPFDHSPIRFCARNGEYVTMDTSWAGFVHPWSRKVAFVLGRHKVRTAPLNEDVFTPPAPSPAPSLDTDIQELSEQIHRLLLQPVHSPSPTGLCGVGAVTSPGPLHSPGSSSDSNGGDAEGPGPPAPVTFQQICKDVHLVKHQGQQLFIESRARPQSRPRLPATGTFKAKALPCQSPDPELEAGSAPVQAPLALVPEEAERKEASSCSYQQINCLDSILRYLESCNLPSTTKRKCASSSSYTTSSASDDDRQRTGPVSVGTKKDPPSAALSGEGATPRKEPVVGGTLSPLALANKAESVVSVTSQCSFSSTIVHVGDKKPPESDIIMMEDLPGLAPGPAPSPAPSPTVAPDPAPDAYRPVGLTKAVLSLHTQKEEQAFLSRFRDLGRLRGLDSSSTAPSALGERGCHHGPAPPSRRHHCRSKAKRSRHHQNPRAEAPCYVSHPSPVPPSTPWPTPPATTPFPAVVQPYPLPVFSPRGGPQPLPPAPTSVPPAAFPAPLVTPMVALVLPNYLFPTPSSYPYGALQTPAEGPPTPASHSPSPSLPALAPSPPHRPDSPLFNSRCSSPLQLNLLQLEELPRAEGAAVAGGPGSSAGPPPPSAEAAEPEARLAEVTESSNQDALSGSSDLLELLLQEDSRSGTGSAASGSLGSGLGSGSGSGSHEGGSTSASITRSSQSSHTSKYFGSIDSSEAEAGAARGGAEPGDQVIKYVLQDPIWLLMANADQRVMMTYQVPSRDMTSVLKQDRERLRAMQKQQPRFSEDQRRELGAVHSWVRKGQLPRALDVMACVDCGSSTQDPGHPDDPLFSELDGLGLEPMEEGGGEQGSSGGGSGEGEGCEEAQGGAKASSSQDLAMEEEEEGRSSSSPALPTAGNCTS

SEQ ID NO: 655 - protein, 323 aa, Homo sapiens
MSAVCGGAARMLRTPGRHGYAAEFSPYLPGRLACATAQHYGIAGCGTLLILDPDEAGLRLFRSFDWNDGLFDVTWSENNEHVLITCSGDGSLQLWDTAKAAGPLQVYKEHAQEVYSVDWSQTRGEQLVVSGSWDQTVKLWDPTVGKSLCTFRGHESIIYSTIWSPHIPGCFASASGDQTLRIWDVKAAGVRIVIPAHQAEILSCDWCKYNENLLVTGAVDCSLRGWDLRNVRQPVFELLGHTYAIRRVKFSPFHASVLASCSYDFTVRFWNFSKPDSLLETVEHHTEFTCGLDFSLQSPTQVADCSWDETIKIYDPACLTIPA

SEQ ID NO: 656 - protein, 576 aa, Homo sapiens
MAQGVLWILLGLLLWSDPGTASLPLLMDSVIQALAELEQKVPAAKTRHTASAWLMSAPNSGPHNRLYHFLLGAWSLNATELDPCPLSPELLGLTKEVARHDVREGKEYGVVLAPDGSTVAVEPLLAGLEAGLQGRRVINLPLDSMAAPWETGDTFPDVVAIAPDVRATSSPGLRDGSPDVTTADIGANTPDATKGCPDVQASLPDAKAKSPPTMVDSLLAVTLAGNLGLTFLRGSQTQSHPDLGTEGCWDQLSAPRTFTLLDPKASLLTMAFLNGALDGVILGDYLSRTPEPRPSLSHLLSQYYGAGVARDPGFRSNFRRQNGAALTSASILAQQVWGTLVLLQRLEPVHLQLQCMSQEQLAQVAANATKEFTEAFLGCPAIHPRCRWGAAPYRGRPKLLQLPLGFLYVHHTYVPAPPCTDFTRCAANMRSMQRYHQDTQGWGDIGYSFVVGSDGYVYEGRGWHWVGAHTLGHNSRGFGVAIVGNYTAALPTEAALRTVRDTLPSCAVRAGLLRPDYALLGHRQLVRTDCPGDALFDLLRTWPHFTATVKPRPARSVSKRSRREPPPRTLPATDLQ

SEQ ID NO: 657 - protein, 1096 aa, Homo sapiens
MATVPVYCVCRLPYDVTRFMIECDACKDWFHGSCVGVEEEEAPDIDIYHCPNCEKTHGKSTLKKKRTWHKHGPGQAPDVKPVQNGSQLFIKELRSRTFPSAEDVVARVPGSQLTLGYMEEHGFTEPILVPKKDGLGLAVPAPTFYVSDVENYVGPERSVDVTDVTKQKDCKMKLKEFVDYYYSTNRKRVLNVTNLEFSDTRMSSFVEPPDIVKKLSWVENYWPDDALLAKPKVTKYCLICVKDSYTDFHIDSGGASAWYHVLKGEKTFYLIRPASANISLYERWRSASNHSEMFFADQVDKCYKCIVKQGQTLFIPSGWIYATLTPVDCLAFAGHFLHSLSVEMQMRAYEVERRLKLGSLTQFPNFETACWYMGKHLLEAFKGSHKSGKQLPPHLVQGAKILNGAFRSWTKKQALAEHEDELPEHFKPSQLIKDLAKEIRLSENASKAVRPEVNTVASSDEVCDGDREKEEPPSPIEATPPQSLLEKVSKKKTPKTVKMPKPSKIPKPPKPPKPPRPPKTLKLKDGGKKKGKKSRESASPTIPNLDLLEAHTKEALTKMEPPKKGKATKSVLSVPNKDVVHMQNDVERLEIREQTKSKSEAKWKYKNSKPDSLLKMEEEQKLEKSPLAGNKDNKFSFSFSNKKLLGSKALRPPTSPGVFGALQNFKEDKPKPVRDEYEYVSDDGELKIDEFPIRRKKNAPKRDLSFLLDKKAVLPTPVTKPKLDSAAYKSDDSSDEGSLHIDTDTKPGRNARVKKESGSSAAGILDLLQASEEVGALEYNPSSQPPASPSTQEAIQGMLSMANLQASDSCLQTTWGAGQAKGSSLAAHGARKNGGGSGKSAGKRLLKRAAKNSVDLDDYEEEQDHLDACFKDSDYVYPSLESDEDNPIFKSRSKKRKGSDDAPYSPTARVGPSVPRQDRPVREGTRVASIETGLAAAAAKLSQQEEQKSKKKKSAKRKLTPNTTSPSTSTSISAGTTSTSTTPASTTPASTTPASTSTASSQASQEGSSPEPPPESHSSSLADHEYTAAGTFTGAQAGRTSQPMAPGVFLTQRRPSASSPNNNTAAKGKRTKKGMATAKQRLGKILKIHRNGKLLL

SEQ ID NO: 658 - protein, 1060 aa, Homo sapiens
MNRSRAIVQRGRVLPPPAPLDTTNLAGRRTLQGRAKMASVPVYCLCRLPYDVTRFMIECDMCQDWFHGSCVGVEEEKAADIDLYHCPNCEVLHGPSIMKKRRGSSKGHDTHKGKPVKTGSPTFVRELRSRTFDSSDEVILKPTGNQLTVEFLEENSFSVPILVLKKDGLGMTLPSPSFTVRDVEHYVGSDKEIDVIDVTRQADCKMKLGDFVKYYYSGKREKVLNVISLEFSDTRLSNLVETPKIVRKLSWVENLWPEECVFERPNVQKYCLMSVRDSYTDFHIDFGGTSVWYHVLKGEKIFYLIRPTNANLTLFECWSSSSNQNEMFFGDQVDKCYKCSVKQGQTLFIPTGWIHAVLTPVDCLAFGGNFLHSLNIEMQLKAYEIEKRLSTADLFRFPNFETICWYVGKHILDIFRGLRENRRHPASYLVHGGKALNLAFRAWTRKEALPDHEDEIPETVRTVQLIKDLAREIRLVEDIFQQNVGKTSNIFGLQRIFPAGSIPLTRPAHSTSVSMSRLSLPSKNGSKKKGLKPKELFKKAERKGKESSALGPAGQLSYNLMDTYSHQALKTGSFQKAKFNITGACLNDSDDDSPDLDLDGNESPLALLMSNGSTKRVKSLSKSRRTKIAKKVDKARLMAEQVMEDEFDLDSDDELQIDERLGKEKATLIIRPKFPRKLPRAKPCSDPNRVREPGEVEFDIEEDYTTDEDMVEGVEGKLGNGSGAGGILDLLKASRQVGGPDYAALTEAPASPSTQEAIQGMLCMANLQSSSSSPATSSLQAWWTGGQDRSSGSSSSGLGTVSNSPASQRTPGKRPIKRPAYWRTESEEEEENASLDEQDSLGACFKDAEYIYPSLESDDDDPALKSRPKKKKNSDDAPWSPKARVTPTLPKQDRPVREGTRVASIETGLAAAAAKLAQQELQKAQKKKYIKKKPLLKEVEQPRPQDSNLSLTVPAPTVAATPQLVTSSSPLPPPEPKQEALSGSLADHEYTARPNAFGMAQANRSTTPMAPGVFLTQRRPSVGSQSNQAGQGKRPKKGLATAKQRLGRILKIHRNGKLLL

SEQ ID NO: 659 - protein, 1821 aa, Homo sapiens
MSCERKGLSELRSELYFLIARFLEDGPCQQAAQVLIREVAEKELLPRRTDWTGKEHPRTYQNLVKYYRHLAPDHLLQICHRLGPLLEQEIPQSVPGVQTLLGAGRQSLLRTNKSCKHVVWKGSALAALHCGRPPESPVNYGSPPSIADTLFSRKLNGKYRLERLVPTAVYQHMKMHKRILGHLSSVYCVTFDRTGRRIFTGSDDCLVKIWATDDGRLLATLRGHAAEISDMAVNYENTMIAAGSCDKMIRVWCLRTCAPLAVLQGHSASITSLQFSPLCSGSKRYLSSTGADGTICFWLWDAGTLKINPRPAKFTERPRPGVQMICSSFSAGGMFLATGSTDHIIRVYFFGSGQPEKISELEFHTDKVDSIQFSNTSNRFVSGSRDGTARIWQFKRREWKSILLDMATRPAGQNLQGIEDKITKMKVTMVAWDRHDNTVITAVNNMTLKVWNSYTGQLIHVLMGHEDEVFVLEPHPFDPRVLFSAGHDGNVIVWDLARGVKIRSYFNMIEGQGHGAVFDCKCSPDGQHFACTDSHGHLLIFGFGSSSKYDKIADQMFFHSDYRPLIRDANNFVLDEQTQQAPHLMPPPFLVDVDGNPHPSRYQRLVPGRENCREEQLIPQMGVTSSGLNQVLSQQANQEISPLDSMIQRLQQEQDLRRSGEAVISNTSRLSRGSISSTSEVHSPPNVGLRRSGQIEGVRQMHSNAPRSEIATERDLVAWSRRVVVPELSAGVASRQEEWRTAKGEEEIKTYRSEEKRKHLTVPKENKIPTVSKNHAHEHFLDLGESKKQQTNQHNYRTRSALEETPRPSEEIENGSSSSDEGEVVAVSGGTSEEEERAWHSDGSSSDYSSDYSDWTADAGINLQPPKKVPKNKTKKAESSSDEEEESEKQKQKQIKKEKKKVNEEKDGPISPKKKKPKERKQKRLAVGELTENGLTLEEWLPSTWITDTIPRRCPFVPQMGDEVYYFRQGHEAYVEMARKNKIYSINPKKQPWHKMELREQELMKIVGIKYEVGLPTLCCLKLAFLDPDTGKLTGGSFTMKYHDMPDVIDFLVLRQQFDDAKYRRWNIGDRFRSVIDDAWWFGTIESQEPLQLEYPDSLFQCYNVCWDNGDTEKMSPWDMELIPNNAVFPEELGTSVPLTDGECRSLIYKPLDGEWGTNPRDEECERIVAGINQLMTLDIASAFVAPVDLQAYPMYCTVVAYPTDLSTIKQRLENRFYRRVSSLMWEVRYIEHNTRTFNEPGSPIVKSAKFVTDLLLHFIKDQTCYNIIPLYNSMKKKVLSDSEDEEKDADVPGTSTRKRKDHQPRRRLRNRAQSYDIQAWKKQCEELLNLIFQCEDSEPFRQPVDLLEYPDYRDIIDTPMDFATVRETLEAGNYESPMELCKDVRLIFSNSKAYTPSKRSRIYSMSLRLSAFFEEHISSVLSDYKSALRFHKRNTITKRRKKRNRSSSVSSSAASSPERKKRILKPQLKSESSTSAFSTPTRSIPPRHNAAQINGKTESSSVVRTRSNRVVVDPVVTEQPSTSSAAKTFITKANASAIPGKTILENSVKHSKALNTLSSPGQSSFSHGTRNNSAKENMEKEKPVKRKMKSSVLPKASTLSKSSAVIEQGDCKNNALVPGTIQVNGHGGQPSKLVKRGPGRKPKVEVNTNSGEIIHKKRGRKPKKLQYAKPEDLEQNNVHPIRDEVLPSSTCNFLSETNNVKEDLLQKKNRGGRKPKRKMKTQKLDADLLVPASVKVLRRSNRKKIDDPIDEEEEFEELKGSEPHMRTRNQGRRTAFYNEDDSEEEQRQLLFEDTSLTFGTSSRGRVRKLTEKAKANLIGW

SEQ ID NO: 660 - protein, 1648 aa, Homo sapiens
MDDDSLDELVARSPGPDGHPQVGPADPAGDFEESSVGSSGDSGDDSDSEHGDGTDGEDEGASEEEDLEDRSGSEDSEDDGETLLEVAGTQGKLEAAGSFNSDDDAESCPICLNAFRDQAVGTPENCAHYFCLDCIVEWSKNANSCPVDRTLFKCICIRAQFGGKILRKIPVENTKASEEEEDPTFCEVCGRSDREDRLLLCDGCDAGYHMECLDPPLQEVPVDEWFCPECAAPGVVLAADAGPVSEEEVSLLLADVVPTTSRLRPRAGRTRAIARTRQSERVRATVNRNRISTARRVQHTPGRLGSSLLDEAIEAVATGLSTAVYQRPLTPRTPARRKRKTRRRKKVPGRKKTPSGPSAKSKSSATRSKKRQHRVKKRRGKKVKSEATTRSRIARTLGLRRPVHSSCIPSVLKPVEPSLGLLRADIGAASLSLFGDPYELDPFDSEELSANPLSPLSAKRRALSRSALQSHQPVARPVSVGLSRRRLPAAVPEPDLEEEPVPDLLGSILSGQSLLMLGSSDVIIHRDGSLSAKRAAPVSFQRNSGSLSRGEEGFKGCLQPRALPSGSPAQGPSGNRPQSTGLSCQGRSRTPARTAGAPVRLDLPAAPGAVQARNLSNGSVPGFRQSHSPWFNGTNKHTLPLASAASKISSRDSKPPCRSVVPGPPLKPAPRRTDISELPRIPKIRRDDGGGRRDAAPAHGQSIEIPSACISRLTGREGTGQPGRGTRAESEASSRVPREPGVHTGSSRPPAPSSHGSLAPLGPSRGKGVGSTFESFRINIPGNMAHSSQLSSPGFCNTFRPVDDKEQRKENPSPLFSIKKTKQLRSEVYDPSDPTGSDSSAPGSSPERSGPGLLPSEITRTISINSPKAQTVQAVRCVTSYTVESIFGTEPEPPLGPSSAMSKLRGAVAAEGASDTEREEPTESQGLAARLRRPSPPEPWDEEDGASCSTFFGSEERTVTCVTVVEPEAPPSPDVLQAATHRVVELRPPSRSRSTSSSRSRKKAKRKRVSREHGRTRSGTRSESRDRSSRSASPSVGEERPRRQRSKAKSRRSSSDRSSSRERAKRKKAKDKSREHRRGPWGHSRRTSRSRSGSPGSSSYEHYESRKKKKRRSASRPRGRECSPTSSLERLCRHKHQRERSHERPDRKESVAWPRDRRKRRSRSPSSEHRAREHRRPRSREKWPQTRSHSPERKGAVREASPAPLAQGEPGREDLPTRLPALGEAHVSPEVATADKAPLQAPPVLEVAAECEPDDLDLDYGDSVEAGHVFDDFSSDAVFIQLDDMSSPPSPESTDSSPERDFPLKPALPPASLAVAAIQREVSLMHDEDPSQPPPLPEGTQEPHLLRPDAAEKAEAPSSPDVAPAGKEDSPSASGRVQEAARPEEVVSQTPLLRSRALVKRVTWNLQESESSAPAEDRAPRAPLHRPQKPREGAWDMEDVAPTGVRQVFSELPFPSHVLPEPGFPDTDPSQVYSPGLPPAPAQPSSIPPCALVSQPTVQFILQGSLPLVGCGAAQTLAPVPAALTPASEPASQATAASNSEEKTPAPRLAAEKTKKEEYMKKLHMQERAVEEVKLAIKPFYQKREVTKEEYKDILRKAVQKICHSKSGEINPVKVANLVKAYVDKYRHMRRHKKPEAGEEPPTQGAEG

SEQ ID NO: 661 - skipped

SEQ ID NO: 662 - protein, 1102 aa, Homo sapiens
MELENYKQPVVLREDNCRRRRRMKPRSAAASLSSMELIPIEFVLPTSQRKCKSPETALLHVAGHGNVEQMKAQVWLRALETSVAADFYHRLGPHHFLLLYQKKGQWYEIYDKYQVVQTLDCLRYWKATHRSPGQIHLVQRHPPSEESQAFQRQLTALIGYDVTDVSNVHDDELEFTRRGLVTPRMAEVASRDPKLYAMHPWVTSKPLPEYLWKKIANNCIFIVIHRSTTSQTIKVSPDDTPGAILQSFFTKMAKKKSLMDIPESQSEQDFVLRVCGRDEYLVGETPIKNFQWVRHCLKNGEEIHVVLDTPPDPALDEVRKEEWPLVDDCTGVTGYHEQLTIHGKDHESVFTVSLWDCDRKFRVKIRGIDIPVLPRNTDLTVFVEANIQHGQQVLCQRRTSPKPFTEEVLWNVWLEFSIKIKDLPKGALLNLQIYCGKAPALSSKASAESPSSESKGKVQLLYYVNLLLIDHRFLLRRGEYVLHMWQISGKGEDQGSFNADKLTSATNPDKENSMSISILLDNYCHPIALPKHQPTPDPEGDRVRAEMPNQLRKQLEAIIATDPLNPLTAEDKELLWHFRYESLKHPKAYPKLFSSVKWGQQEIVAKTYQLLARREVWDQSALDVGLTMQLLDCNFSDENVRAIAVQKLESLEDDDVLHYLLQLVQAVKFEPYHDSALARFLLKRGLRNKRIGHFLFWFLRSEIAQSRHYQQRFAVILEAYLRGCGTAMLHDFTQQVQVIEMLQKVTLDIKSLSAEKYDVSSQVISQLKQKLENLQNSQLPESFRVPYDPGLKAGALAIEKCKVMASKKKPLWLEFKCADPTALSNETIGIIFKHGDDLRQDMLILQILRIMESIWETESLDLCLLPYGCISTGDKIGMIEIVKDATTIAKIQQSTVGNTGAFKDEVLNHWLKEKSPTEEKFQAAVERFVYSCAGYCVATFVLGIGDRHNDNIMITETGNLFHIDFGHILGNYKSFLGINKERVPFVLTPDFLFVMGTSGKKTSPHFQKFQDICVKAYLALRHHTNLLIILFSMMLMTGMPQLTSKEDIEYIRDALTVGKNEEDAKKYFLDQIEVCRDKGWTVQFNWFLHLVLGIKQGEKHSA

SEQ ID NO: 663 - protein, 728 aa, Homo sapiens
MAGPEGFQYRALYPFRRERPEDLELLPGDVLVVSRAALQALGVAEGGERCPQSVGWMPGLNERTRQRGDFPGTYVEFLGPVALARPGPRPRGPRPLPARPRDGAPEPGLTLPDLPEQFSPPDVAPPLLVKLVEAIERTGLDSESHYRPELPAPRTDWSLSDVDQWDTAALADGIKSFLLALPAPLVTPEASAEARRALREAAGPVGPALEPPTLPLHRALTLRFLLQHLGRVARRAPALGPAVRALGATFGPLLLRAPPPPSSPPPGGAPDGSEPSPDFPALLVEKLLQEHLEEQEVAPPALPPKPPKAKPAPTVLANGGSPPSLQDAEWYWGDISREEVNEKLRDTPDGTFLVRDASSKIQGEYTLTLRKGGNNKLIKVFHRDGHYGFSEPLTFCSVVDLINHYRHESLAQYNAKLDTRLLYPVSKYQQDQIVKEDSVEAVGAQLKVYHQQYQDKSREYDQLYEEYTRTSQELQMKRTAIEAFNETIKIFEEQGQTQEKCSKEYLERFRREGNEKEMQRILLNSERLKSRIAEIHESRTKLEQQLRAQASDNREIDKRMNSLKPDLMQLRKIRDQYLVWLTQKGARQKKINEWLGIKNETEDQYALMEDEDDLPHHEERTWYVGKINRTQAEEMLSGKRDGTFLIRESSQRGCYACSVVVDGDTKHCVIYRTATGFGFAEPYNLYGSLKELVLHYQHASLVQHNDALTVTLAHPVRAPGPGPPPAAR

SEQ ID NO: 664 - protein, 328 aa, Homo sapiens
MSMLAERRRKQKWAVDPQNTAWSNDDSKFGQRMLEKMGWSKGKGLGAQEQGATDHIKVQVKNNHLGLGATINNEDNWIAHQDDFNQLLAELNTCHGQETTDSSDKKEKKSFSLEEKSKISKNRVHYMKFTKGKDLSSRSKTDLDCIFGKRQSKKTPEGDASPSTPEENETTTTSAFTIQEYFAKRMAALKNKPQVPVPGSDISETQVERKRGKKRNKEATGKDVESYLQPKAKRHTEGKPERAEAQERVAKKKSAPAEEQLRGPCWDQSSKASAQDAGDHVQPPEGRDFTLKPKKRRGKKKLQKPVEIAEDATLEETLVKKKKKKDSK

SEQ ID NO: 665 - protein, 314 aa, Homo sapiens
MDAFKGGMSLERLPEGLRPPPPPPHDMGPAFHLARPADPREPLENSASESSDTELPEKERGGEPKGPEDSGAGGTGCGGADDPAKKKKQRRQRTHFTSQQLQELEATFQRNRYPDMSMREEIAVWTNLTEPRVRVWFKNRRAKWRKRERNQQLDLCKGGYVPQFSGLVQPYEDVYAAGYSYNNWAAKSLAPAPLSTKSFTFFNSMSPLSSQSMFSAPSSISSMTMPSSMGPGAVPGMPNSGLNNINNLTGSSLNSAMSPGACPYGTPASPYSVYRDTCNSSLASLRLKSKQHSSFGYGGLQGPASGLNACQYNS

SEQ ID NO: 666 - protein, 335 aa, Homo sapiens
MGHPPLLPLLLLLHTCVPASWGLRCMQCKTNGDCRVEECALGQDLCRTTIVRLWEEGEELELVEKSCTHSEKTNRTLSYRTGLKITSLTEVVCGLDLCNQGNSGRAVTYSRSRYLECISCGSSDMSCERGRHQSLQCRSPEEQCLDVVTHWIQEGEEGRPKDDRHLRGCGYLPGCPGSNGFHNNDTFHFLKCCNTTKCNEGPILELENLPQNGRQCYSCKGNSTHGCSSEETFLIDCRGPMNQCLVATGTHEPKNQSYMVRGCATASMCQHAHLGDAFSMNHIDVSCCTKSGCNHPDLDVQYRSGAAPQPGPAHLSLTITLLMTARLWGGTLLWT

SEQ ID NO: 667 - protein, 1216 aa, Homo sapiens
MAGAQPGVHALQLKPVCVSDSLKKGTKFVKWDDDSTIVTPIILRTDPQGFFFYWTDQNKETELLDLSLVKDARCGRHAKAPKDPKLRELLDVGNIGRLEQRMITVVYGPDLVNISHLNLVAFQEEVAKEWTNEVFSLATNLLAQNMSRDAFLEKAYTKLKLQVTPEGRIPLKNIYRLFSADRKRVETALEACSLPSSRNDSIPQEDFTPEVYRVFLNNLCPRPEIDNIFSEFGAKSKPYLTVDQMMDFINLKQRDPRLNEILYPPLKQEQVQVLIEKYEPNNSLARKGQISVDGFMRYLSGEENGVVSPEKLDLNEDMSQPLSHYFINSSHNTYLTAGQLAGNSSVEMYRQVLLSGCRCVELDCWKGRTAEEEPVITHGFTMTTEISFKEVIEAIAECAFKTSPFPILLSFENHVDSPKQQAKMAEYCRLIFGDALLMEPLEKYPLESGVPLPSPMDLMYKILVKNKKKSHKSSEGSGKKKLSEQASNTYSDSSSMFEPSSPGAGEADTESDDDDDDDDCKKSSMDEGTAGSEAMATEEMSNLVNYIQPVKFESFEISKKRNKSFEMSSFVETKGLEQLTKSPVEFVEYNKMQLSRIYPKGTRVDSSNYMPQLFWNAGCQMVALNFQTMDLAMQINMGMYEYNGKSGYRLKPEFMRRPDKHFDPFTEGIVDGIVANTLSVKIISGQFLSDKKVGTYVEVDMFGLPVDTRRKAFKTKTSQGNAVNPVWEEEPIVFKKVVLPTLACLRIAVYEEGGKFIGHRILPVQAIRPGYHYICLRNERNQPLTLPAVFVYIEVKDYVPDTYADVIEALSNPIRYVNLMEQRAKQLAALTLEDEEEVKKEADPGETPSEAPSEARTTPAENGVNHTTTLTPKPPSQALHSQPAPGSVKAPAKTEDLIQSVLTEVEAQTIEELKQQKSFVKLQKKHYKEMKDLVKRHHKKTTDLIKEHTTKYNEIQNDYLRRRAALEKSAKKDSKKKSEPSSPDHGSSTIEQDLAALDAEMTQKLIDLKDKQQQQLLNLRQEQYYSEKYQKREHIKLLIQKLTDVAEECQNNQLKKLKEICEKEKKELKKKMDKKRQEKITEAKSKDKSQMEEEKTEMIRSYIQEVVQYIKRLEEAQSKRQEKLVEKHKEIRQQILDEKPKLQVELEQEYQDKFKRLPLEILEFVQEAMKGKISEDSNHGSAPLSLSSDPGKVNHKTPSSEELGGDIPGKEFDTPL

SEQ ID NO: 668 - protein, 777 aa, Homo sapiens
MQCLGIRSRSRSRELYLQERSLKVAALNGRRLGLQDDEDLQALLKGSQLLKVKSSSWRRERFYKLQEDCKTIWQESRKVMRTPESQLFSIEDIQEVRMGHRTEGLEKFARDVPEDRCFSIVFKDQRNTLDLIAPSPADAQHWVLGLHKIIHHSGSMDQRQKLQHWIHSCLRKADKNKDNKMSFKELQNFLKELNIQVDDSYARKIFRECDHSQTDSLEDEEIEAFYKMLTQRVEIDRTFAEAAGSGETLSVDQLVTFLQHQQREEAAGPALALSLIERYEPSETAKAQRQMTKDGFLMYLLSADGSAFSLAHRRVYQDMGQPLSHYLVSSSHNTYLLEDQLAGPSSTEAYIRALCKGCRCLELDCWDGPNQEPIIYHGYTFTSKILFCDVLRAIRDYAFKASPYPVILSLENHCTLEQQRVMARHLHAILGPMLLNRPLDGVTNSLPSPEQLKGKILLKGKKLGGLLPPGGEGGPEATVVSDEDEAAEMEDEAVRSRVQHKPKEDKLRLAQELSDMVIYCKSVHFGGFSSPGTPGQAFYEMASFSENRALRLLQESGNGFVRHNVGHLSRIYPAGWRTDSSNYSPVEMWNGGCQIVALNFQTPGPEMDVYQGRFQDNGACGYVLKPAFLRDPNGTFNPRALAQGPWWARKRLNIRVISGQQLPKVNKNKNSIVDPKVTVEIHGVSRDVASRQTAVITNNGFNPWWDTEFAFEVVVPDLALIRFLVEDYDASSKNDFIGQSTIPLNSLKQGYRHVHLMSKNGDQHPSATLFVKISLQD

SEQ ID NO: 669 - protein, 52 aa, Homo sapiens
MEKVQYLTRSAIRRASTIEMPQQARQKLQNLFINFCLILICLLLICIIVMLL

SEQ ID NO: 670 - protein, 1894 aa, Homo sapiens
MKAMPWNWTCLLSHLLMVGMGSSTLLTRQPAPLSQKQRSFVTFRGEPAEGFNHLVVDERTGHIYLGAVNRIYKLSSDLKVLVTHETGPDEDNPKCYPPRIVQTCNEPLTTTNNVNKMLLIDYKENRLIACGSLYQGICKLLRLEDLFKLGEPYHKKEHYLSGVNESGSVFGVIVSYSNLDDKLFIATAVDGKPEYFPTISSRKLTKNSEADGMFAYVFHDEFVASMIKIPSDTFTIIPDFDIYYVYGFSSGNFVYFLTLQPEMVSPPGSTTKEQVYTSKLVRLCKEDTAFNSYVEVPIGCERSGVEYRLLQAAYLSKAGAVLGRTLGVHPDDDLLFTVFSKGQKRKMKSLDESALCIFILKQINDRIKERLQSCYRGEGTLDLAWLKVKDIPCSSALLTIDDNFCGLDMNAPLGVSDMVRGIPVFTEDRDRMTSVIAYVYKNHSLAFVGTKSGKLKKIRVDGPRGNALQYETVQVVDPGPVLRDMAFSKDHEQLYIMSERQLTRVPVESCGQYQSCGECLGSGDPHCGWCVLHNTCTRKERCERSKEPRRFASEMKQCVRLTVHPNNISVSQYNVLLVLETYNVPELSAGVNCTFEDLSEMDGLVVGNQIQCYSPAAKEVPRIITENGDHHVVQLQLKSKETGMTFASTSFVFYNCSVHNSCLSCVESPYRCHWCKYRHVCTHDPKTCSFQEGRVKLPEDCPQLLRVDKILVPVEVIKPITLKAKNLPQPQSGQRGYECILNIQGSEQRVPALRFNSSSVQCQNTSYSYEGMEINNLPVELTVVWNGHFNIDNPAQNKVHLYKCGAMRESCGLCLKADPDFACGWCQGPGQCTLRQHCPAQESQWLELSGAKSKCTNPRITEIIPVTGPREGGTKVTIRGENLGLEFRDIASHVKVAGVECSPLVDGYIPAEQIVCEMGEAKPSQHAGFVEICVAVCRPEFMARSSQLYYFMTLTLSDLKPSRGPMSGGTQVTITGTNLNAGSNVVVMFGKQPCLFHRRSPSYIVCNTTSSDEVLEMKVSVQVDRAKIHQDLVFQYVEDPTIVRIEPEWSIVSGNTPIAVWGTHLDLIQNPQIRAKHGGKEHINICEVLNATEMTCQAPALALGPDHQSDLTERPEEFGFILDNVQSLLILNKTNFTYYPNPVFEAFGPSGILELKPGTPIILKGKNLIPPVAGGNVKLNYTVLVGEKPCTVTVSDVQLLCESPNLIGRHKVMARVGGMEYSPGMVYIAPDSPLSLPAIVSIAVAGGLLIIFIVAVLIAYKRKSRESDLTLKRLQMQMDNLESRVALECKEAFAELQTDIHELTSDLDGAGIPFLDYRTYTMRVLFPGIEDHPVLRDLEVPGYRQERVEKGLKLFAQLINNKVFLLSFIRTLESQRSFSMRDRGNVASLIMTVLQSKLEYATDVLKQLLADLIDKNLESKNHPKLLLRRTESVAEKMLTNWFTFLLYKFLKECAGEPLFSLFCAIKQQMEKGPIDAITGEARYSLSEDKLIRQQIDYKTLVLSCVSPDNANSPEVPVKILNCDTITQVKEKILDAIFKNVPCSHRPKAADMDLEWRQGSGARMILQDEDITTKIENDWKRLNTLAHYQVPDGSVVALVSKQVTAYNAVNNSTVSRTSASKYENMIRYTGSPDSLRSRTPMITPDLESGVKMWHLVKNHEHGDQKEGDRGSKMVSEIYLTRLLATKGTLQKFVDDLFETIFSTAHRGSALPLAIKYMFDFLDEQADKHGIHDPHVRHTWKSNCLPLRFWVNMIKNPQFVFDIHKNSITDACLSVVAQTFMDSCSTSEHRLGKDSPSNKLLYAKDIPSYKNWVERYYSDIGKMPAISDQDMNAYLAEQSRMHMNEFNTMSALSEIFSYVGKYSEEILGPLDHDDQCGKQKLAYKLEQVITLMSLDS

SEQ ID NO: 671 - protein, 2135 aa, Homo sapiens
MPALGPALLQALWAGWVLTLQPLPPTAFTPNGTYLQHLARDPTSGTLYLGATNFLFQLSPGLQLEATVSTGPVLDSRDCLPPVMPDECPQAQPTNNPNQLLLVSPGALVVCGSVHQGVCEQRRLGQLEQLLLRPERPGDTQYVAANDPAVSTVGLVAQGLAGEPLLFVGRGYTSRGVGGGIPPITTRALWPPDPQAAFSYEETAKLAVGRLSEYSHHFVSAFARGASAYFLFLRRDLQAQSRAFRAYVSRVCLRDQHYYSYVELPLACEGGRYGLIQAAAVATSREVAHGEVLFAAFSSAAPPTVGRPPSAAAGASGASALCAFPLDEVDRLANRTRDACYTREGRAEDGTEVAYIEYDVNSDCAQLPVDTLDAYPCGSDHTPSPMASRVPLEATPILEWPGIQLTAVAVTMEDGHTIAFLGDSQGQLHRVYLGPGSDGHPYSTQSIQQGSAVSRDLTFDGTFEHLYVMTQSTLLKVPVASCAQHLDCASCLAHRDPYCGWCVLLGRCSRRSECSRGQGPEQWLWSFQPELGCLQVAAMSPANISREETREVFLSVPDLPPLWPGESYSCHFGEHQSPALLTGSGVMCPSPDPSEAPVLPRGADYVSVSVELRFGAVVIAKTSLSFYDCVAVTELRPSAQCQACVSSRWGCNWCVWQHLCTHKASCDAGPMVASHQSPLVSPDPPARGGPSPSPPTAPKALATPAPDTLPVEPGAPSTATASDISPGASPSLLSPWGPWAGSGSISSPGSTGSPLHEEPSPPSPQNGPGTAVPAPTDFRPSATPEDLLASPLSPSEVAAVPPADPGPEALHPTVPLDLPPATVPATTFPGAMGSVKPALDWLTREGGELPEADEWTGGDAPAFSTSTLLSGDGDSAELEGPPAPLILPSSLDYQYDTPGLWELEEATLGASSCPCVESVQGSTLMPVHVEREIRLLGRNLHLFQDGPGDNECVMELEGLEVVVEARVECEPPPDTQCHVTCQQHQLSYEALQPELRVGLFLRRAGRLRVDSAEGLHVVLYDCSVGHGDCSRCQTAMPQYGCVWCEGERPRCVTREACGEAEAVATQCPAPLIHSVEPLTGPVDGGTRVTIRGSNLGQHVQDVLGMVTVAGVPCAVDAQEYEVSSSLVCITGASGEEVAGATAVEVPGRGRGVSEHDFAYQDPKVHSIFPARGPRAGGTRLTLNGSKLLTGRLEDIRVVVGDQPCHLLPEQQSEQLRCETSPRPTPATLPVAVWFGATERRLQRGQFKYTLDPNITSAGPTKSFLSGGREICVRGQNLDVVQTPRIRVTVVSRMLQPSQGLGRRRRVVPETACSLGPSCSSQQFEEPCHVNSSQLITCRTPALPGLPEDPWVRVEFILDNLVFDFATLNPTPFSYEADPTLQPLNPEDPTMPFRHKPGSVFSVEGENLDLAMSKEEVVAMIGDGPCVVKTLTRHHLYCEPPVEQPLPRHHALREAPDSLPEFTVQMGNLRFSLGHVQYDGESPGAFPVAAQVGLGVGTSLLALGVIIIVLMYRRKSKQALRDYKKVQIQLENLESSVRDRCKKEFTDLMTEMTDLTSDLLGSGIPFLDYKVYAERIFFPGHRESPLHRDLGVPESRRPTVEQGLGQLSNLLNSKLFLTKFIHTLESQRTFSARDRAYVASLLTVALHGKLEYFTDILRTLLSDLVAQYVAKNPKLMLRRTETVVEKLLTNWMSICLYTFVRDSVGEPLYMLFRGIKHQVDKGPVDSVTGKAKYTLNDNRLLREDVEYRPLTLNALLAVGPGAGEAQGVPVKVLDCDTISQAKEKMLDQLYKGVPLTQRPDPRTLDVEWRSGVAGHLILSDEDVTSEVQGLWRRLNTLQHYKVPDGATVALVPCLTKHVLRENQDYVPGERTPMLEDVDEGGIRPWHLVKPSDEPEPPRPRRGSLRGGERERAKAIPEIYLTRLLSMKGTLQKFVDDLFQVILSTSRPVPLAVKYFFDLLDEQAQQHGISDQDTIHIWKTNSLPLRFWINIIKNPQFVFDVQTSDNMDAVLLVIAQTFMDACTLADHKLGRDSPINKLLYARDIPRYKRMVERYYADIRQTVPASDQEMNSVLAELSWNYSGDLGARVALHELYKYINKYYDQIITALEEDGTAQKMQLGYRLQQIAAAVENKVTDL

SEQ ID NO: 672 - protein, 1410 aa, Homo sapiens
MADTDLFMECEEEELEPWQKISDVIEDSVVEDYNSVDKTTTVSVSQQPVSAPVPIAAHASVAGHLSTSTTVSSSGAQNSDSTKKTLVTLIANNNAGNPLVQQGGQPLILTQNPAPGLGTMVTQPVLRPVQVMQNANHVTSSPVASQPIFITTQGFPVRNVRPVQNAMNQVGIVLNVQQGQTVRPITLVPAPGTQFVKPTVGVPQVFSQMTPVRPGSTMPVRPTTNTFTTVIPATLTIRSTVPQSQSQQTKSTPSTSTTPTATQPTSLGQLAVQSPGQSNQTTNPKLAPSFPSPPAVSIASFVTVKRPGVTGENSNEVAKLVNTLNTIPSLGQSPGPVVVSNNSSAHGSQRTSGPESSMKVTSSIPVFDLQDGGRKICPRCNAQFRVTEALRGHMCYCCPEMVEYQKKGKSLDSEPSVPSAAKPPSPEKTAPVASTPSSTPIPALSPPTKVPEPNENVGDAVQTKLIMLVDDFYYGRDGGKVAQLTNFPKVATSFRCPHCTKRLKNNIRFMNHMKHHVELDQQNGEVDGHTICQHCYRQFSTPFQLQCHLENVHSPYESTTKCKICEWAFESEPLFLQHMKDTHKPGEMPYVCQVCQYRSSLYSEVDVHFRMIHEDTRHLLCPYCLKVFKNGNAFQQHYMRHQKRNVYHCNKCRLQFLFAKDKIEHKLQHHKTFRKPKQLEGLKPGTKVTIRASRGQPRTVPVSSNDTPPSALQEAAPLTSSMDPLPVFLYPPVQRSIQKRAVRKMSVMGRQTCLECSFEIPDFPNHFPTYVHCSLCRYSTCCSRAYANHMINNHVPRKSPKYLALFKNSVSGIKLACTSCTFVTSVGDAMAKHLVFNPSHRSSSILPRGLTWIAHSRHGQTRDRVHDRNVKNMYPPPSFPTNKAATVKSAGATPAEPEELLTPLAPALPSPASTATPPPTPTHPQALALPPLATEGAECLNVDDQDEGSPVTQEPELASGGGGSGGVGKKEQLSVKKLRVVLFALCCNTEQAAEHFRNPQRRIRRWLRRFQASQGENLEGKYLSFEAEEKLAEWVLTQREQQLPVNEETLFQKATKIGRSLEGGFKISYEWAVRFMLRHHLTPHARRAVAHTLPKDVAENAGLFIDFVQRQIHNQDLPLSMIVAIDEISLFLDTEVLSSDDRKENALQTVGTGEPWCDVVLAILADGTVLPTLVFYRGQMDQPANMPDSILLEAKESGYSDDEIMELWSTRVWQKHTACQRSKGMLVMDCHRTHLSEEVLAMLSASSTLPAVVPAGCSSKIQPLDVCIKRTVKNFLHKKWKEQAREMADTACDSDVLLQLVLVWLGEVLGVIGDCPELVQRSFLVASVLPGPDGNINSPTRNADMQEELIASLEEQLKLSGEHSESSTPRPRSSPEETIEPESLHQLFEGESETESFYGFEEADLDLMEI

SEQ ID NO: 673 - protein, 748 aa, Homo sapiens
MDDWKPSPLIKPFGARKKRSWYLTWKYKLTNQRALRRFCQTGAVLFLLVTVIVNIKLILDTRRAISEANEDPEPEQDYDEALGRLEPPRRRGSGPRRVLDVEVYSSRSKVYVAVDGTTVLEDEAREQGRGIHVIVLNQATGHVMAKRVFDTYSPHEDEAMVLFLNMVAPGRVLICTVKDEGSFHLKDTAKALLRSLGSQAGPALGWRDTWAFVGRKGGPVFGEKHSKSPALSSWGDPVLLKTDVPLSSAEEAECHWADTELNRRRRRFCSKVEGYGSVCSCKDPTPIEFSPDPLPDNKVLNVPVAVIAGNRPNYLYRMLRSLLSAQGVSPQMITVFIDGYYEEPMDVVALFGLRGIQHTPISIKNARVSQHYKASLTATFNLFPEAKFAVVLEEDLDIAVDFFSFLSQSIHLLEEDDSLYCISAWNDQGYEHTAEDPALLYRVETMPGLGWVLRRSLYKEELEPKWPTPEKLWDWDMWMRMPEQRRGRECIIPDVSRSYHFGIVGLNMNGYFHEAYFKKHKFNTVPGVQLRNVDSLKKEAYEVEVHRLLSEAEVLDHSKNPCEDSFLPDTEGHTYVAFIRMEKDDDFTTWTQLAKCLHIWDLDVRGNHRGLWRLFRKKNHFLVSEEATLSHPNFPGATPKGGGSPRSPRTDMRPPPGPCGAGPGSESNLFIDCPEGLENRPNLEGLDFFLGWNAALRVGLALTQETAVPNPWTGPAGAHMLTQTHSETLRHWTRPPLSLLFVQISKAG

SEQ ID NO: 674 - protein, 355 aa, Homo sapiens [sequence omitted]

SEQ ID NO: 675 - protein, 634 aa, Homo sapiens
MSLVPATNYIYTPLNQLKGGTIVNVYGVVKFFKPPYLSKGTDYCSVVTIVDQTNVKLTCLLFSGNYEALPIIYKNGDIVRFHRLKIQVYKKETQGITSSGFASLTFEGTLGAPIIPRTSSKYFNFTTEDHKMVEALRVWASTHMSPSWTLLKLCDVQPMQYFDLTCQLLGKAEVDGASFLLKVWDGTRTPFPSWRVLIQDLVLEGDLSHIHRLQNLTIDILVYDNHVHVARSLKVGSFLRIYSLHTKLQSMNSENQTMLSLEFHLHGGTSYGRGIRVLPESNSDVDQLKKDLESANLTANQHSDVICQSEPDDSFPSSGSVSLYEVERCQQLSATILTDHQYLERTPLCAILKQKAPQQYRIRAKLRSYKPRRLFQSVKLHCPKCHLLQEVPHEGDLDIIFQDGATKTPDVKLQNTSLYDSKIWTTKNQKGRKVAVHFVKNNGILPLSNECLLLIEGGTLSEICKLSNKFNSVIPVRSGHEDLELLDLSAPFLIQGTIHHYGCKQCSSLRSIQNLNSLVDKTSWIPSSVAEALGIVPLQYVFVMTFTLDDGTGVLEAYLMDSDKFFQIPASEVLMDDDLQKSVDMIMDMFCPPGIKIDAYPWLECFIKSYNVTNGTDNQICYQIFDTTVAEDVI

SEQ ID NO: 676 - protein, 443 aa, Homo sapiens
MATAASNHYSLLTSSASIVHAEPPGGMQQGAGGYREAQSLVQGDYGALQSNGHPLSHAHQWITALSHGGGGGGGGGGGGGGGGGGGGGDGSPWSTSPLGQPDIKPSVVVQQGGRGDELHGPGALQQQHQQQQQQQQQQQQQQQQQQQQQRPPHLVHHAANHHPGPGAWRSAAAAAHLPPSMGASNGGLLYSQPSFTVNGMLGAGGQPAGLHHHGLRDAHDEPHHADHHPHPHSHPHQQPPPPPPPQGPPGHPGAHHDPHSDEDTPTSDDLEQFAKQFKQRRIKLGFTQADVGLALGTLYGNVFSQTTICRFEALQLSFKNMCKLKPLLNKWLEEADSSSGSPTSIDKIAAQGRKRKKRTSIEVSVKGALESHFLKCPKPSAQEITSLADSLQLEKEVVRVWFCNRRQKEKRMTPPGGTLPGAEDVYGGSRDTPPHHGVQTPVQ

SEQ ID NO: 677 - protein, 1202 aa, Homo sapiens
MMCEVMPTISEAEGPPGGGGGHGSGSPSQPDADSHFEQLMVSMLEERDRLLDTLRETQETLALTQGKLHEVGHERDSLQRQLNTALPQEFAALTKELNVCREQLLEREEEIAELKAERNNTRLLLEHLECLVSRHERSLRMTVVKRQAQSPAGVSSEVEVLKALKSLFEHHKALDEKVRERLRVALERCSLLEEELGATHKELMILKEQNNQKKTLTDGVLDINHEQENTPSTSGKRSSDGSLSHEEDLAKVIELQEIISKQSREQSQMKERLASLSSHVTELEEDLDTARKDLIKSEEMNTKLQRDVREAMAQKEDMEERITTLEKRYLAAQREATSVHDLNDKLENEIANKDSMHRQTEDKNRQLQERLELAEQKLQQTLRKAETLPEVEAELAQRVAALSKAEERHGNIEERLRQMEAQLEEKNQELQRARQREKMNEEHNKRLSDTVDKLLSESNERLQLHLKERMAALEDKNSLLREVESAKKQLEETQHDKDQLVLNIEALRAELDHMRLRGASLHHGRPHLGSVPDFRFPMADGHTDSYSTSAVLRRPQKGRLAALRDEPSKVQTLNEQDWERAQQASVLANVAQAFESDADVSDGEDDRDTLLSSVDLLSPSGQADAHTLAMMLQEQLDAINKEIRLIQEEKENTEQRAEEIESRVGSGSLDNLGRFRSMSSIPPYPASSLASSSPPGSGRSTPRRIPHSPAREVDRLGVMTLLPPSREEVRDDKTTIKCETSPPSSPRALRLDRLHKGALHTVSHEDIRDIRNSTGSQDGPVSNPSSSNSSQDSLHKAPKKKGIKSSIGRLFGKKEKGRPGQTGKEALGQAGVSETDNSSQDALGLSKLGGQAEKNRKLQKKHELLEEARRQGLPFAQWDGPTVVVWLELWVGMPAWYVAACRANVKSGAIMSALSDTEIQREIGISNPLHRLKLRLAIQEIMSLTSPSAPPTSRTTLAYGDMNHEWIGNEWLPSLGLPQYRSYFMECLVDARMLDHLTKKDLRGQLKMVDSFHRNSFQCGIMCLRRLNYDRKELERKREESQSEIKDVLVWSNDRVIRWILSIGLKEYANNLIESGVHGALLALDETFDFSALALLLQIPTQNTQARAVLEREFNNLLVMGTDRRFDEDDDKSFRRAPSWRKKFRPKDIRGLAAGSAETLPANFRVTSSMSSPSMQPKKMQMDGNVSGTQRLDSATVRTYSC

SEQ ID NO: 678 - protein, 204 aa, Homo sapiens
MDPKDRKKIQFSVPAPPSQLDPRQVEMIRRRRPTPAMLFRLSEHSSPEEEASPHQRASGEGHHLKSKRPNPCAYTPPSLKAVQRIAESHLQSISNLNENQASEEEDELGELRELGYPREEDEEEEEDDEEEEEEEDSQAEVLKVIRQSAGQKTTCGQGLEGPWERPPPLDESERDGGSEDQVEDPALSEPGEEPQRPSPSEPGT

SEQ ID NO: 679 - protein, 799 aa, Homo sapiens
MARTAPVEPPLRHSAPPSPAAGEPRTSVEAAVAPRRVLFADEALGLPLAQLRRYRPWGGPGAGKMAAAAGQDGGGGGGADEDDDGEDGDEGEEEEEACPEPSPLCPVPAGGGFYLVPTFSLPPAPGRLERLGRVMVELEALLPPPGAVPGGAGVWVPGGRPPVLRGLVRVLNRSFEKAVHVRASHDGWASFCDHPARYVPRSPPWAGAGGTGAGDPILDPGLGLGPGQASASSPDDGGRTDRFAFQLPFAEGAGDGARLDFVVRYETPEGTFWANNHGRNYTVLLRIAPAPTPTDAEGLPQQQQLPQLEPQPECQGPVEAEARQLKSCMKPVRRRPAEEELKTKNMDDNTFAMAEHPDVQESVGPLVAPTPLRPWPQMTLQVSDVPMTGNPAEEGDVPRSSPPVAFTEVLQAPAIRIPPSSPLCGLGGSPRDQASGPDASEGATGPFLEPSQQQAEATWGVSSENGGGLEAVSGSEELLGEDTIDQELEQLYLSHLSRLRAAVAAGGAGGGGEGSTDGGMSPSHPLGILTDRDLILKWPGPERALNSALAEEITLHYARLGRGVELIKDTEDPDDEGEGEEGLSVTPSSPEGDSPKESPPEILSGARSVVATMGDVWLPWAEGSGCDGPVVLGTEGQFIGDPEKGMGKDTSSLHMNRVIAGVTESLGEAGTEAQIEVTSEWAGSLDPISGKEPASPVLLQGQNPTLLSPLGAEVCLSSVARPHVSSQDEKDAGPSLEPPKKSPTLAVPAECVCALPPQLRGPLTQTLGVLAGLVVVPVALNSGVSLLVLALCLSLAWFS

SEQ ID NO: 680 - protein, 667 aa, Homo sapiens
MAGASELGTGPGAAGGDGDDSLYPIAVLIDELRNEDVQLRLNSIKKLSTIALALGVERTRSELLPFLTDTIYDEDEVLLALAEQLGNFTGLVGGPDFAHCLLPPLENLATVEETVVRDKAVESLRQISQEHTPVALEAYFVPLVKRLASGDWFTSRTSACGLFSVCYPRASNAVKAEIRQQFRSLCSDDTPMVRRAAASKLGEFAKVLELDSVKSEIVPLFTSLASDEQDSVRLLAVEACVSIAQLLSQDDLETLVMPTLRQAAEDKSWRVRYMVADRFSELQKAMGPKITLNDLIPAFQNLLKDCEAEVRAAAAHKVKELGENLPIEDRETIIMNQILPYIKELVSDTNQHVKSALASVIMGLSTILGKENTIEHLLPLFLAQLKDECPDVRLNIISNLDCVNEVIGIRQLSQSLLPAIVELAEDAKWRVRLAIIEYMPLLAGQLGVEFFDEKLNSLCMAWLVDHVYAIREAATNNLMKLVQKFGTEWAQNTIVPKVLVMANDPNYLHRMTTLFCINALSEACGQEITTKQMLPIVLKMAGDQVANVRFNVAKSLQKIGPILDTNALQGEVKPVLQKLGQDEDMDVKYFAQEAISVVAQRLRKLEFPVKDSGEPSVPRADKNHFPRPTVPGEDMGKGPVYQLRGDTRDTLAQLGIAELVHFSQSTD

SEQ ID NO: 681 - protein, 602 aa, Homo sapiens
MPYKLKKEKEPPKVAKCTAKPSSSGKDGGGENTEEAQPQPQPQPQPQAQSQPPSSNKRPSNSTPPPTQLSKIKYSGGPQIVKKERRQSSSRFNLSKNRELQKLPALKDSPTQEREELFIQKLRQCCVLFDFVSDPLSDLKFKEVKRAGLNEMVEYITHSRDVVTEAIYPEAVTMFSVNLFRTLPPSSNPTGAEFDPEEDEPTLEAAWPHLQLVYEFFLRFLESPDFQPNIAKKYIDQKFVLALLDLFDSEDPRERDFLKTILHRIYGKFLGLRAYIRRQINHIFYRFIYETEHHNGIAELLEILGSIINGFALPLKEEHKMFLIRVLLPLHKVKSLSVYHPQLAYCVVQFLEKESSLTEPVIVGLLKFWPKTHSPKEVMFLNELEEILDVIEPSEFSKVMEPLFRQLAKCVSSPHFQVAERALYYWNNEYIMSLISDNAARVLPIMFPALYRNSKSHWNKTIHGLIYNALKLFMEMNQKLFDDCTQQYKAEKQKGRFRMKEREEMWQKIEELARLNPQYPMFRAPPPLPPVYSMETETPTAEDIQLLKRTVETEAVQMLKDIKKEKVLLRRKSELPQDVYTIKALEAHKRAEEFLTASQEAL

SEQ ID NO: 682 - protein, 1659 aa, Homo sapiens
MEAPSGSEPGGDGAGDCAHPDPRAPGAAAPSSGPGPCAAARESERQLRLRLCVLNEILGTERDYVGTLRFLQSAFLHRIRQNVADSVEKGLTEENVKVLFSNIEDILEVHKDFLAALEYCLHPEPQSQHELGNVFLKFKDKFCVYEEYCSNHEKALRLLVELNKIPTVRAFLLSCMLLGGRKTTDIPLEGYLLSPIQRICKYPLLLKELAKRTPGKHPDHPAVQSALQAMKTVCSNINETKRQMEKLEALEQLQSHIEGWEGSNLTDICTQLLLQGTLLKISAGNIQERAFFLFDNLLVYCKRKSRVTGSKKSTKRTKSINGSLYIFRGRINTEVMEVENVEDGTADYHSNGYTVTNGWKIHNTAKNKWFVCMAKTAEEKQKWLDAIIREREQRESLKLGMERDAYVMIAEKGEKLYHMMMNKKVNLIKDRRRKLSTVPKCFLGNEFVAWLLEIGEISKTEEGVNLGQALLENGIIHHVSDKHQFKNEQVMYRFRYDDGTYKARSELEDIMSKGVRLYCRLHSLYTPVIKDRDYHLKTYKSVLPGSKLVDWLLAQGDCQTREEAVALGVGLCNNGFMHHVLEKSEFRDESQYFRFHADEEMEGTSSKNKQLRNDFKLVENILAKRLLILPQEEDYGFDIEEKNKAVVVKSVQRGSLAEVAGLQVGRKIYSINEDLVFLRPFSEVESILNQSFCSRRPLRLLVATKAKEIIKIPDQPDTLCFQIRGAAPPYVYAVGRGSEAMAAGLCAGQCILKVNGSNVMNDGAPEVLEHFQAFRSRREEALGLYQWIYHTHEDAQEARASQEASTEDPSGEQAQEEDQADSAFPLLSLGPRLSLCEDSPMVTLTVDNVHLEHGVVYEYVSTAGVRCHVLEKIVEPRGCFGLTAKILEAFAANDSVFVENCRRLMALSSAIVTMPHFEFRNICDTKLESIGQRIACYQEFAAQLKSRVSPPFKQAPLEPHPLCGLDFCPTNCHINLMEVSYPKTTPSVGRSFSIRFGRKPSLIGLDPEQGHLNPMSYTQHCITTMAAPSWKCLPAAEGDPQGQGLHDGSFGPASGTLGQEDRGLSFLLKQEDREIQDAYLQLFTKLDVALKEMKQYVTQINRLLSTITEPTSGGSCDASLAEEASSLPLVSEESEMDRSDHGGIKKVCFKVAEEDQEDSGHDTMSYRDSYSECNSNRDSVLSYTSVRSNSSYLGSDEMGSGDELPCDMRIPSDKQDKLHGCLEHLFNQVDSINALLKGPVMSRAFEETKHFPMNHSLQEFKQKEECTIRGRSLIQISIQEDPWNLPNSIKTLVDNIQRYVEDGKNQLLLALLKCTDTELQLRRDAIFCQALVAAVCTFSEQLLAALGYRYNNNGEYEESSRDASRKWLEQVAATGVLLHCQSLLSPATVKEERTMLEDIWVTLSELDNVTFSFKQLDENYVANTNVFYHIEGSRQALKVIFYLDSYHFSKLPSRLEGGASLRLHTALFTKVLENVEGLPSPGSQAAEDLQQDINAQSLEKVQQYYRKLRAFYLERSNLPTDASTTAVKIDQLIRPINALDELCRLMKSFVHPKPGAAGSVGAGLIPISSELCYRLGACQMVMCGTGMQRSTLSVSLEQAAILARSHGLLPKCIMQATDIMRKQGPRVEILAKNLRVKDQMPQGAPRLYRLCQPPVDGDL

SEQ ID NO: 683 - protein, 831 aa, Homo sapiens
MPLEMEPKMSKLAFGCQRSSTSDDDSGCALEEYAWVPPGLRPEQIQLYFACLPEEKVPYVNSPGEKHRIKQLLYQLPPHDNEVRYCQSLSEEEKKELQVFSAQRKKEALGRGTIKLLSRAVMHAVCEQCGLKINGGEVAVFASRAGPGVCWHPSCFVCFTCNELLVDLIYFYQDGKIHCGRHHAELLKPRCSACDEIIFADECTEAEGRHWHMKHFCCLECETVLGGQRYIMKDGRPFCCGCFESLYAEYCETCGEHIGVDHAQMTYDGQHWHATEACFSCAQCKASLLGCPFLPKQGQIYCSKTCSLGEDVHASDSSDSAFQSARSRDSRRSVRMGKSSRSADQCRQSLLLSPALNYKFPGLSGNADDTLSRKLDDLSLSRQGTSFASEEFWKGRVEQETPEDPEEWADHEDYMTQLLLKFGDKSLFQPQPNEMDIRASEHWISDNMVKSKTELKQNNQSLASKKYQSDMYWAQSQDGLGDSAYGSHPGPASSRRLQELELDHGASGYNHDETQWYEDSLECLSDLKPEQSVRDSMDSLALSNITGASVDGENKPRPSLYSLQNFEEMETEDCEKMSNMGTLNSSMLHRSAESLKSLSSELCPEKILPEEKPVHLPVLRRSKSQSRPQQVKFSDDVIDNGNYDIEIRQPPMSERTRRRVYNFEERGSRSHHHRRRRSRKSRSDNALNLVTERKYSPKDRLRLYTPDNYEKFIQNKSAREIQAYIQNADLYGQYAHATSDYGLQNPGMNRFLGLYGEDDDSWCSSSSSSSDSEEEGYFLGQPIPQPRPQRFAYYTDDLSSPPSALPTPQFGQRTTKSKKKKGHKGKNCIIS

SEQ ID NO: 684 - protein, 844 aa, Homo sapiens
MVTVMPLEMEKTISKLMFDFQRNSTSDDDSGCALEEYAWVPPGLKPEQVHQYYSCLPEEKVPYVNSPGEKLRIKQLLHQLPPHDNEVRYCNSLDEEEKRELKLFSSQRKRENLGRGNVRPFPVTMTGAICEQCGGQINGGDIAVFASRAGHGVCWHPPCFVCTVCNELLVDLIYFYQDGKIYCGRHHAECLKPRCAACDEIIFADECTEAEGRHWHMKHFCCFECETVLGGQRYIMKEGRPYCCHCFESLYAEYCDTCAQHIGIDQGQMTYDGQHWHATETCFCCAHCKKSLLGRPFLPKQGQIFCSRACSAGEDPNGSDSSDSAFQNARAKESRRSAKIGKNKGKTEEPMLNQHSQLQVSSNRLSADVDPLSLQMDMLSLSSQTPSLNRDPIWRSREEPYHYGNKMEQNQTQSPLQLLSQCNIRTSYSPGGQGAGAQPEMWGKHFSNPKRSSSLAMTGHAGSFIKECREDYYPGRLRSQESYSDMSSQSFSETRGSIQVPKYEEEEEEEGGLSTQQCRTRHPISSLKYTEDMTPTEQTPRGSMESLALSNATGLSADGGAKRQEHLSRFSMPDLSKDSGMNVSEKLSNMGTLNSSMQFRSAESVRSLLSAQQYQEMEGNLHQLSNPIGYRDLQSHGRMHQSFDFDGGMAGSKLPGQEGVRIQPMSERTRRRATSRDDNRRFRPHRSRRSRRSRSDNALHLASEREAISRLKDRPPLRAREDYDQFMRQRSFQESMGHGSRRDLYGQCPRTVSDLALQNAFGDRWGPYFAEYDWCSTCSSSSESDNEGYFLGEPIPQPARLRYVTSDELLHKYSSYGLPKSSTLGGRGQLHSRKRQKSKNCIIS

SEQ ID NO: 685 - protein, 673 aa, Homo sapiens
MADPAAGPPPSEGEESTVRFARKGALRQKNVHEVKNHKFTARFFKQPTFCSHCTDFIWGFGKQGFQCQVCCFVVHKRCHEFVTFSCPGADKGPASDDPRSKHKFKIHTYSSPTFCDHCGSLLYGLIHQGMKCDTCMMNVHKRCVMNVPSLCGTDHTERRGRIYIQAHIDRDVLIVLVRDAKNLVPMDPNGLSDPYVKLKLIPDPKSESKQKTKTIKCSLNPEWNETFRFQLKESDKDRRLSVEIWDWDLTSRNDFMGSLSFGISELQKASVDGWFKLLSQEEGEYFNVPVPPEGSEANEELRQKFERAKISQGTKVPEEKTTNTVSKFDNNGNRDRMKLTDFNFLMVLGKGSFGKVMLSERKGTDELYAVKILKKDVVIQDDDVECTMVEKRVLALPGKPPFLTQLHSCFQTMDRLYFVMEYVNGGDLMYHIQQVGRFKEPHAVFYAAEIAIGLFFLQSKGIIYRDLKLDNVMLDSEGHIKIADFGMCKENIWDGVTTKTFCGTPDYIAPEIIAYQPYGKSVDWWAFGVLLYEMLAGQAPFEGEDEDELFQSIMEHNVAYPKSMSKEAVAICKGLMTKHPGKRLGCGPEGERDIKEHAFFRYIDWEKLERKEIQPPYKPKACGRNAENFDRFFTRHPPVLTPPDQEVIRNIDQSEFEGFSFVNSEFLKPEVKS

SEQ ID NO: 686 - protein, 912 aa, Homo sapiens
MSAPPVLRPPSPLLPVAAAAAAAAAALVPGSGPGPAPFLAPVAAPVGGISFHLQIGLSREPVLLLQDSSGDYSLAHVREMACSIVDQKFPECGFYGMYDKILLFRHDPTSENILQLVKAASDIQEGDLIEVVLSASATFEDFQIRPHALFVHSYRAPAFCDHCGEMLWGLVRQGLKCEGCGLNYHKRCAFKIPNNCSGVRRRRLSNVSLTGVSTIRTSSAELSTSAPDEPLLQKSPSESFIGREKRSNSQSYIGRPIHLDKILMSKVKVPHTFVIHSYTRPTVCQYCKKLLKGLFRQGLQCKDCRFNCHKRCAPKVPNNCLGEVTINGDLLSPGAESDVVMEEGSDDNDSERNSGLMDDMEEAMVQDAEMAMAECQNDSGEMQDPDPDHEDANRTISPSTSNNIPLMRVVQSVKHTKRKSSTVMKEGWMVHYTSKDTLRKRHYWRLDSKCITLFQNDTGSRYYKEIPLSEILSLEPVKTSALIPNGANPHCFEITTANVVYYVGENVVNPSSPSPNNSVLTSGVGADVARMWEIAIQHALMPVIPKGSSVGTGTNLHRDISVSISVSNCQIQENVDISTVYQIFPDEVLGSGQFGIVYGGKHRKTGRDVAIKIIDKLRFPTKQESQLRNEVAILQNLHHPGVVNLECMFETPERVFVVMEKLHGDMLEMILSSEKGRLPEHITKFLITQILVALRHLHFKNIVHCDLKPENVLLASADPFPQVKLCDFGFARIIGEKSFRRSVVGTPAYLAPEVLRNKGYNRSLDMWSVGVIIYVSLSGTFPFNEDEDIHDQIQNAAFMYPPNPWKEISHEAIDLINNLLQVKMRKRYSVDKTLSHPWLQDYQTWLDLRELECKIGERYITHESDDLRWEKYAGEQGLQYPTHLINPSASHSDTPETEETEMKALGERVSIL

SEQ ID NO: 687 - protein, 4128 aa, Homo sapiens [sequence omitted]

SEQ ID NO: 688 - protein, 600 aa, Homo sapiens
MALRRALPALRPCIPRFVPLSTAPASREQPAAGPAAVPGGGSATAVRPPVPAVDFGNAQEAYRSRRTWELARSLLVLRLCAWPALLARHEQLLYVSRKLLGQRLFNKLMKMTFYGHFVAGEDQESIQPLLRHYRAFGVSAILDYGVEEDLSPEEAEHKEMESCTSAAERDGSGTNKRDKQYQAHRAFGDRRNGVISARTYFYANEAKCDSHMETFLRCIEASGRVSDDGFIAIKLTALGRPQFLLQFSEVLAKWRCFFHQMAVEQGQAGLAAMDTKLEVAVLQESVAKLGIASRAEIEDWFTAETLGVSGTMDLLDWSSLIDSRTKLSKHLVVPNAQTGQLEPLLSRFTEEEELQMTRMLQRMDVLAKKATEMGVRLMVDAEQTYFQPAISRLTLEMQRKFNVEKPLIFNTYQCYLKDAYDNVTLDVELARREGWCFGAKLVRGAYLAQERARAAEIGYEDPINPTYEATNAMYHRCLDYVLEELKHNAKAKVMVASHNEDTVRFALRRMEELGLHPADHQVYFGQLLGMCDQISFPLGQAGYPVYKYVPYGPVMEVLPYLSRRALENSSLMKGTHRERQLLWLELLRRLRTGNLFHRPA

SEQ ID NO: 689 - protein, 326 aa, Homo sapiens
MAAPASVMGPLGPSALGLLLLLLVVAPPRVAALVHRQPENQGISLTGSVACGRPSMEGKILGGVPAPERKWPWQVSVHYAGLHVCGGSILNEYWVLSAAHCFHRDKNIKIYDMYVGLVNLRVAGNHTQWYEVNRVILHPTYEMYHPIGGDVALVQLKTRIVFSESVLPVCLATPEVNLTSANCWATGWGLVSKQGETSDELQEMQLPLILEPWCHLLYGHMSYIMPDMLCAGDILNAKTVCEGDSGGPLVCEFNRSWLQIGIVSWGRGCSNPLYPGVYASVSYFSKWICDNIEITPTPAQPAPALSPALGPTLSVLMAMLAGWSVL

SEQ ID NO: 690 - protein, 3088 aa, Homo sapiens
MEEFLQRAKSKLNRSKRLEKVHVVIGPKSCDLDSLISTFTYAYFLDKVSPPGVLCLPVLNIPRTEFNYFTETRFILEELNISESFHIFRDEINLHQLNDEGKLSITLVGSSVLASEDKTLESAVVKVINPVEQSDANVEFRESSSSLVLKEILQEAPELITEQLAHRLRGSILFKWMTMESEKISEKQEEILSILEEKFPNLPPREDIINVLQETQFSAQGLSIEQTMLKDLKELSDGEIKVAISTVSMNLENCLFHSNITSDLKAFTDKFGFDVLILFSSYLSEEQQPRRQIAVYSENMELCSQICCELEECQNPCLELEPFDCGCDEILVYQQEDPSVTCDQVVLVVKEVINRRCPEMVSNSRTSSTEAVAGSAPLSQGSSGIMELYGSDIEPQPSSVNFIENPPDLNDSNQAQVDANVDLVSPDSGLATIRSSRSSKESSVFLSDDSPVGEGAGPHHTLLPGLDSYSPIPEGAVAEEHAWSGEHGEHFDLFNFDPAPMASGQSQQSSHSADYSPADDFFPNSDLSEGQLPAGPEGLDGMGTNMSNYSSSSLLSGAGKDSLVEHDEEFVQRQDSPRDNSERNLSLTDFVGDESPSPERLKNTGKRIPPTPMNSLVESSPSTEEPASLYTEDMTQKATDTGHMGPPQTHARCSSWWGGLEIDSKNIADAWSSSEQESVFQSPESWKEHKPSSIDRRASDSVFQPKSLEFTKSGPWESEFGQPELGSNDIQDKNEESLPFQNLPMEKSPLPNTSPQGTNHLIEDFASLWHSGRSPTAMPEPWGNPTDDGEPAAVAPFPAWSAFGKEDHDEALKNTWNLHPTSSKTPSVRDPNEWAMAKSGFAFSSSELLDNSPSEINNEAAPEIWGKKNNDSRDHIFAPGNPSSDLDHTWTNSKPPKEDQNGLVDPKTRGKVYEKVDSWNLFEENMKKGGSDVLVPWEDSFLSYKCSDYSASNLGEDSVPSPLDTNYSTSDSYTSPTFAGDEKETEHKPFAKEEGFESKDGNSTAEETDIPPQSLQQSSRNRISSGPGNLDMWASPHTDNSSEINTTHNLDENELKTEHTDGKNISMEDDVGESSQSSYDDPSMMQLYNETNRQLTLLHSSTNSRQTAPDSLDLWNRVILEDTQSTATISDMDNDLDWDDCSGGAAIPSDGQTEGYMAEGSEPETRFTVRQLEPWGLEYQEANQVDWELPASDEHTKDSAPSEHHTLNEKSGQLIANSIWDSVMRDKDMSSFMLPGSSHITDSEQRELPPEIPSHSANVKDTHSPDAPAASGTSESEALISHLDKQDTERETLQSDAASLATRLENPGYFPHPDPWKGHGDGQSESEKEAQGATDRGHLDEEEVIASGVENASGISEKGQSDQELSSLVASEHQEICIKSGKISSLAVTFSPQTEEPEEVLEYEEGSYNLDSRDVQTGMSADNLQPKDTHEKHLMSQRNSGETTETSDGMNFTKYVSVPEKDLEKTEECNFLEPENVGGGPPHRVPRSLDFGDVPIDSDVHVSSTCSEITKNLDVKGSENSLPGAGSSGNFDRDTISSEYTHSSASSPELNDSSVALSSWGQQPSSGYQEENQGNWSEQNHQESELITTDGQVEIVTKVKDLEKNRINEFEKSFDRKTPTFLEIWNDSVDGDSFSSLSSPETGKYSEHSGTHQESNLIASYQEKNEHDISATVQPEDARVISTSSGSDDDSVGGEESIEEEIQVANCHVAEDESRAWDSLNESNKFLVTADPKSENIYDYLDSSEPAENENKSNPFCDNQQSSPDPWTFSPLTETEMQITAVEKEKRSSPETGTTGDVAWQISPKASFPKNEDNSQLEMLGFSADSTEWWKASPQEGRLIESPFERELSDSSGVLEINSSVHQNASPWGVPVQGDIEPVETHYTNPFSDNHQSPFLEGNGKNSHEQLWNIQPRQPDPDADKFSQLVKLDQIKEKDSREQTFVSAAGDELTPETPTQEQCQDTMLPVCDHPDTAFTHAEENSCVTSNVSTNEGQETNQWEQEKSYLGEMTNSSIATENFPAVSSPTQLIMKPGSEWDGSTPSEDSRGTFVPDILHGNFQEGGQLASAAPDLWIDAKKPFSLKADGENPDILTHCEHDSNSQASDSPDICHDSEAKQETEKHLSACMGPEVESSELCLTEPEIDEEPIYEPGREFVPSNAELDSENATVLPPIGYQADIKGSSQPASHKGSPEPSEINGDNSTGLQVSEKGASPDMAPILEPVDRRIPRIENVATSIFVTHQEPTPEGDGSWISDSFSPESQPGARALFDGDPHLSTENPALVPDALLASDTCLDISEAAFDHSFSDASGLNTSTGTIDDMSKLTLSEGHPETPVDGDLGKQDICSSEASWGDFEYDVMGQNIDEDLLREPEHFLYGGDPPLEEDSLKQSLAPYTPPFDLSYLTEPAQSAETIEEAGSPEDESLGCRAAEIVLSALPDRRSEGNQAETKNRLPGSQLAVLHIREDPESVYLPVGAGSNILSPSNVDWEVETDNSDLPAGGDIGPPNGASKEISELEEEKTIPTKEPEQIKSEYKEERCTEKNEDRHALHMDYILVNREENSHSKPETCEERESIAELELYVGSKETGLQGTQLASFPDTCQPASLNERKGLSAEKMSSKSDTRSSFESPAQDQSWMFLGHSEVGDPSLDARDSGPGWSGKTVEPFSELGLGEGPQLQILEEMKPLESLALEEASGPVSQSQKSKSRGRAGPDAVTLQAVTHDNEWEMLSPQPVQKNMIPDTEMEEETEFLELGTRISRPNGLLSEDVGMDIPFEEGVLSPSAADMRPEPPNSLDLNDTHPRRIKLTAPNINLSLDQSEGSILSDDNLDSPDEIDINVDELDTPDEADSFEYTGHDPTANKDSGQESESIPEYTAEEEREDNRLWRTVVIGEQEQRIDMKVIEPYRRVISHGGYYGDGLNAIIVFAACFLPDSSRADYHYVMENLFLYVISTLELMVAEDYMIVYLNGATPRRRMPGLGWMKKCYQMIDRRLRKNLKSFIIVHPSWFIRTILAVTRPFISSKFSSKIKYVNSLSELSGLIPMDCIHIPESIIKLDEELREASEAAKTSCLYNDPEMSSMEKDIDLKLKEKP

SEQ ID NO: 691 - protein, 1047 aa, Homo sapiens
MEGRSAAAETFVWVNNASAHSQSVAKAKYEFLFGRSEGKAPDTSDHGGSTLLPPNVTNEFPEYGTMEEGGEGLRASLEFDGEALPCHPQEQQGVQPLTGCHSGLDSVTEGPKDVREAPSQSHLKEQSLQPIDSLISALKATEARIISGTLQATKVLDQDAVSSFSVQQVEKELDTASRKTQRVNKTLPAGQKNLPEIPLSAEVTTEESFYLSIQKDLTALLTGDTQAEISQIMNNGRKGAVCVQEPSCPLASLGSSAVTCHSAGSVGFLKEQRSALGREHPGGCDRSSSMGRPGRVKHVEFQGVEILWTGGDKRETQHPIDFETSLQRTASPDSKESSKVPRHLISSAGLCNSSSLTENVWDESWKAPSERPGTSSGTFSPVRLDESGEDEVFLQENKQHLEKTPKPERDRERISEQEEHVKGEDEDILGPGYTEDSTDVYSSQFETILDNTSLYYSAESLETLYSEPDSYFSFEMPLTPMIQQRIKEGGQFLERTSGGGHQDILSVSADGGIVMGYSSGVTNGLNDASDSIYTKGTPEIAFWGSNAGVKTTRLEAHSEMGSTEILEKETPENLSNGTSSNVEAAKRLAKRLYQLDRFKRSDVAKHLGKNNEFSKLVAEEYLKFFDFTGMTLDQSLRYFFKAFSLVGETQERERVLIHFSNRYFYCNPDTIASQDGVHCLTCAIMLLNTDLHGHNIGKKMTCQEFIANLQGVNEGVDFSKDLLKALYNSIKNEKLEWAVDDEEKKKSPSESTEEKANGTHPKTISRIGSTTNPFLDIPHDPNAAVYKSGFLARKIHADMDGKKTPRGKRGWKTFYAVLKGTVLYLQKDEYKPEKALSEEDLKNAVSVHHALASKATDYEKKPNVFKLKTADWRVLLFQTQSPEEMQGWINKINCVAAVFSAPPFPAAIGSQKKFSRPLLPATTTKLSQEEQLKSHESKLKQITTELAEHRSYPPDKKVKAKDVDEYKLKDHYLEFEKTRYEMYVSILKEGGKELLSNDESEAAGLKKSHSSPSLNPDTSPITAKVKRNVSERKDHRPETPSIKQKVT

SEQ ID NO: 692 - protein, 226 aa, Homo sapiens
MEGCVSNLMVCNLAYSGKLEELKESILADKSLATRTDQDSRTALHWACSAGHTEIVEFLLQLGVPVNDKDDAGWSPLHIAASAGRDEIVKALLGKGAQVNAVNQNGCTPLHYAASKNRHEIAVMLLEGGANPDAKDHYEATAMHRAAAKGNLKMIHILLYYKASTNIQDTEGNTPLHLACDEERVEEAKLLVSQGASIYIENKEEKTPLQVAKGGLGLILKRMVEG

SEQ ID NO: 693 - protein, 456 aa, Homo sapiens
MADGGSERADGRIVKMEVDYSATVDQRLPECAKLAKEGRLQEVIETLLSLEKQTRTASDMVSTSRILVAVVKMCYEAKEWDLLNENIMLLSKRRSQLKQAVAKMVQQCCTYVEEITDLPIKLRLIDTLRMVTEGKIYVEIERARLTKTLATIKEQNGDVKEAASILQELQVETYGSMEKKERVEFILEQMRLCLAVKDYIRTQIISKKINTKFFQEENTEKLKLKYYNLMIQLDQHEGSYLSICKHYRAIYDTPCIQAESEKWQQALKSVVLYVILAPFDNEQSDLVHRISGDKKLEEIPKYKDLLKLFTTMELMRWSTLVEDYGMELRKGSLESPATDVFGSTEEGEKRWKDLKNRVVEHNIRIMAKYYTRITMKRMAQLLDLSVDESEAFLSNLVVNKTIFAKVDRLAGIINFQRPKDPNNLLNDWSQKLNSLMSLVNKTTHLIAKEEMIHNLQ

SEQ ID NO: 694 - protein, 531 aa, Homo sapiens
MDGIVTEVAVGVKRGSDELLSGSVLSSPNSNMSSMVVTANGNDSKKFKGEDKMDGAPSRVLHIRKLPGEVTETEVIALGLPFGKVTNILMLKGKNQAFLELATEEAAITMVNYYSAVTPHLRNQPIYIQYSNHKELKTDNTLNQRAQAVLQAVTAVQTANTPLSGTTVSESAVTPAQSPVLRIIIDNMYYPVTLDVLHQIFSKFGAVLKIITFTKNNQFQALLQYGDPVNAQQAKLALDGQNIYNACCTLRIDFSKLVNLNVKYNNDKSRDYTRPDLPSGDGQPALDPAIAAAFAKETSLLAVPGALSPLAIPNAAAAAAAAAAGRVGMPGVSAGGNTVLLVSNLNEEMVTPQSLFTLFGVYGDVQRVKILYNKKDSALIQMADGNQSQLAMNHLNGQKMYGKIIRVTLSKHQTVQLPREGLDDQGLTKDFGNSPLHRFKKPGSKNFQNIFPPSATLHLSNIPPSVAEEDLRTLFANTGGTVKAFKFFQDHKMALLQMATVEEAIQALIDLHNYNLGENHHLRVSFSKSTI

SEQ ID NO: 695 - protein, 888 aa, Homo sapiens
MLRQVLHRGLRTCFSRLGHFIASHPVFFASAPVLISILLGASFSRYQVEESVEHLLAPQHSLAKIERNLVNSLFPVNRSKHRLYSDLQTPGRYGRVIVTSFQKANMLDQHHTDLILKLHAAVTKIQVPRPGFNYTFAHICILNNDKTCIVDDIVHVLEELKNARATNRTNFAITYPITHLKDGRAVYNGHQLGGVTVHSKDRVKSAEAIQLTYYLQSINSLNDMVAERWESSFCDTVRLFQKSNSKVKMYPYTSSSLREDFQKTSRVSERYLVTSLILVVTMAILCCSMQDCVRSKPWLGLLGLVTISLATLTAAGIINLTGGKYNSTFLGVPFVMLGHGLYGTFEMLSSWRKTREDQHVKERTAAVYADSMLSFSLTTAMYLVTFGIGASPFTNIEAARIFCCNSCIAIFFNYLYVLSFYGSSLVFTGYIENNYQHSIFCRKVPKPEALQEKPAWYRFLLTARFSEDTAEGEEANTYESHLLVCFLKRYYCDWITNTYVKPFVVLFYLIYISFALMGYLQVSEGSDLSNIVATATQTIEYTTAQQKYFSNYSPVIGFYIYESIEYWNTSVQEDVLEYTKGFVRISWFESYLNYLRKLNVSTGLPKKNFTDMLRNSFLKAPQFSHFQEDIIFSKKYNDEVDVVASRMFLVAKTMETNREELYDLLETLRRLSVTSKVKFIVFNPSFVYMDRYASSLGAPLHNSCISALFLLFFSAFLVADSLINVWITLTVVSVEFGVIGFMTLWKVELDCISVLCLIYGINYTIDNCAPMLSTFVLGKDFTRTKWVKNALEVHGVAILQSYLCYIVGLIPLAAVPSNLTCTLFRCLFLIAFVTFFHCFAILPVILTFLPPSKKKRKEKKNPENREEIECVEMVDIDSTRVVDQITTV

SEQ ID NO: 696 - protein, 403 aa, Homo sapiens [sequence omitted]

SEQ ID NO: 697 - protein, 418 aa, Homo sapiens
MKETRGYGGDAPFCTRLNHSYTGMWAPERSAEARGNLTRPPGSGEDCGSVSVAFPITMLLTGFVGNALAMLLVSRSYRRRESKRKKSFLLCIGWLALTDLVGQLLTTPVVIVVYLSKQRWEHIDPSGRLCTFFGLTMTVFGLSSLFIASAMAVERALAIRAPHWYASHMKTRATRAVLLGVWLAVLAFALLPVLGVGQYTVQWPGTWCFISTGRGGNGTSSSHNWGNLFFASAFAFLGLLALTVTFSCNLATIKALVSRCRAKATASQSSAQWGRITTETAIQLMGIMCVLSVCWSPLLIMMLKMIFNQTSVEHCKTHTEKQKECNFFLIAVRLASLNQILDPWVYLLLRKILLRKFCQMRKRRLREQLICSLQNSQIQRATAHCGQVQTYRVLNREEMEVLVSSINVYTRISTVKTE

SEQ ID NO: 698 - protein, 604 aa, Homo sapiens
MLARALLLCAVLALSHTANPCCSHPCQNRGVCMSVGFDQYKCDCTRTGFYGENCSTPEFLTRIKLFLKPTPNTVHYILTHFKGFWNVVNNIPFLRNAIMSYVLTSRSHLIDSPPTYNADYGYKSWEAFSNLSYYTRALPPVPDDCPTPLGVKGKKQLPDSNEIVEKLLLRRKFIPDPQGSNMMFAFFAQHFTHQFFKTDHKRGPAFTNGLGHGVDLNHIYGETLARQRKLRLFKDGKMKYQIIDGEMYPPTVKDTQAEMIYPPQVPEHLRFAVGQEVFGLVPGLMMYATIWLREHNRVCDVLKQEHPEWGDEQLFQTSRLILIGETIKIVIEDYVQHLSGYHFKLKFDPELLFNKQFQYQNRIAAEFNTLYHWHPLLPDTFQIHDQKYNYQQFIYNNSILLEHGITQFVESFTRQIAGRVAGGRNVPPAVQKVSQASIDQSRQMKYQSFNEYRKRFMLKPYESFEELTGEKEMSAELEALYGDIDAVELYPALLVEKPRPDAIFGETMVEVGAPFSLKGLMGNVICSPAYWKPSTFGGEVGFQIINTASIQSLICNNVKGCPFTSFSVPDPELIKTVTINASSSRSGLDDINPTVLLKERSTEL

SEQ ID NO: 699 - protein, 1078 aa, Homo sapiens
MGSFLSGEKRPSAPTVGSAMEKKEFPTPPGRVGPGTQTAIVFIKQPSSQDALQGRRALLRCEVEAPGPVHVYWLLDGAPVQDTERRFAQGSSLSFAAVDRLQDSGTFQCVARDDVTGEEARSANASFNIKWIEAGPVVLKHPASEAEIQPQTQVTLRCHIDGHPRPTYQWFRDGTPLSDGQSNHTVSSKERNLTLRPAGPEHSGLYSCCAHSAFGQACSSQNFTLSIADESFARVVLAPQDVVVARYEEAMFHCQFSAQPPPSLQWLFEDETPITNRSRPPHLRRATVFANGSLLLTQVRPRNAGIYRCIGQGQRGPPIILEATLHLAEIEDMPLFEPRVFTAGSEERVTCLPPKGLPEPSVWWEHAGVRLPTHGRVYQKGHELVLANIAESDAGVYTCHAANLAGQRRQDVNITVATVPSWLKKPQDSQLEEGKPGYLDCLTQATPKPTVVWYRNQMLISEDSRFEVFKNGTLRINSVEVYDGTWYRCMSSTPAGSIEAQARVQVLEKLKFTPPPQPQQCMEFDKEATVPCSATGREKPTIKWERADGSSLPEWVTDNAGTLHFARVTRDDAGNYTCIASNGPQGQIRAHVQLTVAVFITFKVEPERTTVYQGHTALLQCEAQGDPKPLIQWKGKDRILDPTKLGPRMHIFQNGSLVIHDVAPEDSGRYTCIAGNSCNIKHTEAPLYVVDKPVPEESEGPGSPPPYKMIQTIGLSVGAAVAYIIAVLGLMFYCKKRCKAKRLQKQPEGEEPEMECLNGGPLQNGQPSAEIQEEVALTSLGSGPAATNKRHSTSDKMHFPRSSLQPITTLGKSEFGEVFLAKAQGLEEGVAETLVLVKSLQSKDEQQQLDFRRELEMFGKLNHANVVRLLGLCREAEPHYMVLEYVDLGDLKQFLRISKSKDEKLKSQPLSTKQKVALCTQVALGMEHLSNNRFVHKDLAARNCLVSAQRQVKVSALGLSKDVYNSEYYHFRQAWVPLRWMSPEAILEGDFSTKSDVWAFGVLMWEVFTHGEMPHGGQADDEVLADLQAGKARLPQPEGCPSKLYRLMQRCWALSPKDRPSFSEIASALGDSTVDSKP

SEQ ID NO: 700 - protein, 593 aa, Homo sapiens [sequence omitted]

SEQ ID NO: 701 - protein, 2215 aa, Homo sapiens
MEAEFYMVILTCLIFRNSEGFQIVHVQKQQCLFKNEKVVVGSCNRTIQNQQWMWTEDEKLLHVKSALCLAISNSSRGPSRSAILDRCSQAPRWTCYDQEGFLEVENASLFLQKQGSRVVVKKARKYLHSWMKIDVNKEGKLVNESLCLQKAGLGAEVSVRSTRNTAPPQILTTFNAVPDGLVFLIRNTTEAFIRNAAENYSQNSSERQHPNLHMTGITDTSWVLSTTQPFSSTTEETGLAEPERCNFTLAESKASSHSVSIQWRILGSPCNFSLIYSSDTLGAALCPTFRIDNTTYGCNLQDLQAGTIYNFRIISLDEERTVVLQTDPLPPARFGVSKEKTTSTSLHVWWTPSSGKVTSYEVQLFDENNQKIQGVQIQESTSWNEYTFFNLTAGSKYNIAITAVSGGKRSFSVYTNGSTVPSPVKDIGISTKANSLLISWSHGSGNVERYRLMLMDKGILVHGGVVDKHATSYAFHGLTPGYLYNLTVMTEAAGLQNYRWKLVRTAPMEVSNLKVTNDGSLTSLKVKWQRPPGNVDSYNITLSHKGTIKESRVLAPWITETHFKELVPGRLYQVTVSCVSGELSAQKMAVGRTFPDKVANLEANNNGRMRSLVVSWSPPAGDWEQYRILLFNDSVVLLNITVGKEETQYVMDDTGLVPGRQYEVEVIVESGNLKNSERCQGRTVPLAVLQLRVKHANETSLSIMWQTPVAEWEKYIISLADRDLLLIHKSLSKDAKEFTFTDLVPGRKYMATVTSISGDLKNSSSVKGRTVPAQVTDLHVANQGMTSSLFTNWTQAQGDVEFYQVLLIHENVVIKNESISSETSRYSFHSLKSGSLYSVVVTTVSGGISSRQVVVEGRTVPSSVSGVTVNNSGRNDYLSVSWLLAPGDVDNYEVTLSHDGKVVQSLVIAKSVRECSFSSLTPGRLYTVTITTRSGKYENHSFSQERTVPDKVQGVSVSNSARSDYLRVSWVHATGDFDHYEVTIKNKNNFIQTKSIPKSENECVFVQLVPGRLYSVTVTTKSGQYEANEQGNGRTIPEPVKDLTLRNRSTEDLHVTWSGANGDVDQYEIQLLFNDMKVFPPFHLVNTATEYRFTSLTPGRQYKILVLTISGDVQQSAFIEGFTVPSAVKNIHISPNGATDSLTVNWTPGGGDVDSYTVSAFRHSQKVDSQTIPKHVFEHTFHRLEAGEQYQIMIASVSGSLKNQINVVGRTVPASVQGVIADNAYSSYSLIVSWQKAAGVAERYDILLLTENGILLRNTSEPATTKQHKFEDLTPGKKYKIQILTVSGGLFSKEAQTEGRTVPAAVTDLRITENSTRHLSFRWTASEGELSWYNIFLYNPDGNLQERAQVDPLVQSFSFQNLLQGRMYKMVIVTHSGELSNESFIFGRTVPASVSHLRGSNRNTTDSLWFNWSPASGDFDFYELILYNPNGTKKENWKDKDLTEWRFQGLVPGRKYVLWVVTHSGDLSNKVTAESRTAPSPPSLMSFADIANTSLAITWKGPPDWTDYNDFELQWLPRDALTVFNPYNNRKSEGRIVYGLRPGRSYQFNVKTVSGDSWKTYSKPIFGSVRTKPDKIQNLHCRPQNSTAIACSWIPPDSDFDGYSIECRKMDTQEVEFSRKLEKEKSLLNIMMLVPHKRYLVSIKVQSAGMTSEVVEDSTITMIDRPPPPPPHIRVNEKDVLISKSSINFTVNCSWFSDTNGAVKYFTVVVREADGSDELKPEQQHPLPSYLEYRHNASIRVYQTNYFASKCAENPNSNSKSFNIKLGAEMESLGGKCDPTQQKFCDGPLKPHTAYRISIRAFTQLFDEDLKEFTKPLYSDTFFSLPITTESEPLFGAIEGVSAGLFLIGMLVAVVALLICRQKVSHGRERPSARLSIRRDRPLSVHLNLGQKGNRKTSCPIKINQFEGHFMKLQADSNYLLSKEYEELKDVGRNQSCDIALLPENRGKNRYNNILPYDATRVKLSNVDDDPCSDYINASYIPGNNFRREYIVTQGPLPGTKDDFWKMVWEQNVHNIVMVTQCVEKGRVKCDHYWPADQDSLYYGDLILQMLSESVLPEWTIREFKICGEEQLDAHRLIRHFHYTVWPDHGVPETTQSLIQFVRTVRDYINRSPGAGPTVVHCSAGVGRTGTFIALDRILQQLDSKDSVDIYGAVHDLRLHRVHMVQTECQYVYLHQCVRDVLRARKLRSEQENPLFPIYENVNPEYHRDPVYSRH

SEQ ID NO: 702 - protein, 1306 aa, Homo sapiens
MTMYLWLKLLAFGFAFLDTEVFVTGQSPTPSPTGLTTAKMPSVPLSSDPLPTHTTAFSPASTFERENDFSETTTSLSPDNTSTQVSPDSLDNASAFNTTGVSSVQTPHLPTHADSQTPSAGTDTQTFSGSAANAKLNPTPGSNAISDVPGERSTASTFPTDPVSPLTTTLSLAHHSSAALPARTSNTTITANTSDAYLNASETTTLSPSGSAVISTTTIATTPSKPTCDEKYANITVDYLYNKETKLFTAKLNVNENVECGNNTCTNNEVHNLTECKNASVSISHNSCTAPDKTLILDVPPGVEKFQLHDCTQVEKADTTICLKWKNIETFTCDTQNITYRFQCGNMIFDNKEIKLENLEPEHEYKCDSEILYNNHKFTNASKIIKTDFGSPGEPQIIFCRSEAAHQGVITWNPPQRSFHNFTLCYIKETEKDCLNLDKNLIKYDLQNLKPYTKYVLSLHAYIIAKVQRNGSAAMCHFTTKSAPPSQVWNMTVSMTSDNSMHVKCRPPRDRNGPHERYHLEVEAGNTLVRNESHKNCDFRVKDLQYSTDYTFKAYFHNGDYPGEPFILHHSTSYNSKALIAFLAFLIIVTSIALLVVLYKIYDLHKKRSCNLDEQQELVERDDEKQLMNVEPIHADILLETYKRKIADEGRLFLAEFQSIPRVFSKFPIKEARKPFNQNKNRYVDILPYDYNRVELSEINGDAGSNYINASYIDGFKEPRKYIAAQGPRDETVDDFWRMIWEQKATVIVMVTRCEEGNRNKCAEYWPSMEEGTRAFGDVVVKINQHKRCPDYIIQKLNIVNKKEKATGREVTHIQFTSWPDHGVPEDPHLLLKLRRRVNAFSNFFSGPIVVHCSAGVGRTGTYIGIDAMLEGLEAENKVDVYGYVVKLRRQRCLMVQVEAQYILIHQALVEYNQFGETEVNLSELHPYLHNMKKRDPPSEPSPLEAEFQRLPSYRSWRTQHIGNQEENKSKNRNSNVIPYDYNRVPLKHELEMSKESEHDSDESSDDDSDSEEPSKYINASFIMSYWKPEVMIAAQGPLKETIGDFWQMIFQRKVKVIVMLTELKHGDQEICAQYWGEGKQTYGDIEVDLKDTDKSSTYTLRVFELRHSKRKDSRTVYQYQYTNWSVEQLPAEPKELISMIQVVKQKLPQKNSSEGNKHHKSTPLLIHCRDGSQQTGIFCALLNLLESAETEEVVDIFQVVKALRKARPGMVSTFEQYQFLYDVIASTYPAQNGQVKKNNHQEDKIEFDNEVDKVKQDANCVNPLGAPEKLPEAKEQAEGSEPTSGTEGPEHSVNGPASPALNQGS

SEQ ID NO: 703 - skipped

SEQ ID NO: 704 - protein, 1460 aa, Homo sapiens
MASLAALALSLLLRLQLPPLPGARAQSAAGGCSFDEHYSNCGYSVALGTNGFTWEQINTWEKPMLDQAVPTGSFMMVNSSGRASGQKAHLLLPTLKENDTHCIDFHYYFSSRDRSSPGALNVYVKVNGGPQGNPVWNVSGVVTEGWVKAELAISTFWPHFYQVIFESVSLKGHPGYIAVDEVRVLAHPCRKAPHFLRLQNVEVNVGQNATFQCIAGGKWSQHDKLWLQQWNGRDTALMVTRVVNHRRFSATVSVADTAQRSVSKYRCVIRSDGGSGVSNYAELIVKEPPTPIAPPELLAVGATYLWIKPNANSIIGDGPIILKEVEYRTTTGTWAETHIVDSPNYKLWHLDPDVEYEIRVLLTRPGEGGTGPPGPPLTTRTKCADPVHGPQNVEIVDIRARQLTLQWEPFGYAVTRCHSYNLTVQYQYVFNQQQYEAEEVIQTSSHYTLRGLRPFMTIRLRLLLSNPEGRMESEELVVQTEEDVPGAVPLESIQGGPFEEKIYIQWKPPNETNGVITLYEINYKAVGSLDPSADLSSQRGKVFKLRNETHHLFVGLYPGTTYSFTIKASTAKGFGPPVTTRIATKISAPSMPEYDTDTPLNETDTTITVMLKPAQSRGAPVSVYQLVVKEERLQKSRRAADIIECFSVPVSYRNASSLDSLHYFAAELKPANLPVTQPFTVGDNKTYNGYWNPPLSPLKSYSIYFQALSKANGETKINCVRLATKAPMGSAQVTPGTPLCLLTTGASTQNSNTVEPEKQVDNTVKMAGVIAGLLMFIIILLGVMLTIKRRRNAYSYSYYLKLAKKQKETQSGAQREMGPVASADKPTTKLSASRNDEGFSSSSQDVNGFTDGSRGELSQPTLTIQTHPYRTCDPVEMSYPRDQFQPAIRVADLLQHITQMKRGQGYGFKEEYEALPEGQTASWDTAKEDENRNKNRYGNIISYDHSRVRLLVLDGDPHSDYINANYIDGYHRPRHYIATQGPMQETVKDFWRMIWQENSASIVMVTNLVEVGRVKCVRYWPDDTEVYGDIKVTLIETEPLAEYVIRTFTVQKKGYHEIRELRLFHFTSWPDHGVPCYATGLLGFVRQVKFLNPPEAGPIVVHCSAGAGRTGCFIAIDTMLDMAENEGVVDIFNCVRELRAQRVNLVQTEEQYVFVHDAILEACLCGNTAIPVCEFRSLYYNISRLDPQTNSSQIKDEFQTLNIVTPRVRPEDCSIGLLPRNHDKNRSMDVLPLDRCLPFLISVDGESSNYINAALMDSHKQPAAFVVTQHPLPNTVADFWRLVFDYNCSSVVMLNEMDTAQFCMQYWPEKTSGCYGPIQVEFVSADIDEDIIHRIFRICNMARPQDGYRIVQHLQYIGWPAYRDTPPSKRSLLKVVRRLEKWQEQYDGREGRTVVHCLNGGGRSGTFCAICSVCEMIQQQNIIDVFHIVKTLRNNKSNMVETLEQYKFVYEVALEYLSSF

SEQ ID NO: 705 - protein, 110 aa, Homo sapiens
MSMTDLLNAEDIKKAVGAFSATDSFDHKKFFQMVGLKKKSADDVKKVFHMLDKDKSGFIEEDELGFILKGFSPDARDLSAKETKMLMAAGDKDGDGKIGVDEFSTLVAES

SEQ ID NO: 706 - skipped

SEQ ID NO: 707 - protein, 1479 aa, Homo sapiens
MAKRSRGPGRRCLLALVLFCAWGTLAVVAQKPGAGCPSRCLCFRTTVRCMHLLLEAVPAVAPQTSILDLRFNRIREIQPGAFRRLRNLNTLLLNNNQIKRIPSGAFEDLENLKYLYLYKNEIQSIDRQAFKGLASLEQLYLHFNQIETLDPDSFQHLPKLERLFLHNNRITHLVPGTFNHLESMKRLRLDSNTLHCDCEILWLADLLKTYAESGNAQAAAICEYPRRIQGRSVATITPEELNCERPRITSEPQDADVTSGNTVYFTCRAEGNPKPEIIWLRNNNELSMKTDSRLNLLDDGTLMIQNTQETDQGIYQCMAKNVAGEVKTQEVTLRYFGSPARPTFVIQPQNTEVLVGESVTLECSATGHPPPRISWTRGDRTPLPVDPRVNITPSGGLYIQNVVQGDSGEYACSATNNIDSVHATAFIIVQALPQFTVTPQDRVVIEGQTVDFQCEAKGNPPPVIAWTKGGSQLSVDRRHLVLSSGTLRISGVALHDQGQYECQAVNIIGSQKVVAHLTVQPRVTPVFASIPSDTTVEVGANVQLPCSSQGEPEPAITWNKDGVQVTESGKFHISPEGFLTINDVGPADAGRYECVARNTIGSASVSMVLSVNVPDVSRNGDPFVATSIVEAIATVDRAINSTRTHLFDSRPRSPNDLLALFRYPRDPYTVEQARAGEIFERTLQLIQEHVQHGLMVDLNGTSYHYNDLVSPQYLNLIANLSGCTAHRRVNNCSDMCFHQKYRTHDGTCNNLQHPMWGASLTAFERLLKSVYENGFNTPRGINPHRLYNGHALPMPRLVSTTLIGTETVTPDEQFTHMLMQWGQFLDHDLDSTVVALSQARFSDGQHCSNVCSNDPPCFSVMIPPNDSRARSGARCMFFVRSSPVCGSGMTSLLMNSVYPREQINQLTSYIDASNVYGSTEHEARSIRDLASHRGLLRQGIVQRSGKPLLPFATGPPTECMRDENESPIPCFLAGDHRANEQLGLTSMHTLWFREHNRIATELLKLNPHWDGDTIYYETRKIVGAEIQHITYQHWLPKILGEVGMRTLGEYHGYDPGINAGIFNAFATAAFRFGHTLVNPLLYRLDENFQPIAQDHLPLHKAFFSPFRIVNEGGIDPLLRGLFGVAGKMRVPSQLLNTELTERLFSMAHTVALDLAAINIQRGRDHGIPPYHDYRVYCNLSAAHTFEDLKNEIKNPEIREKLKRLYGSTLNIDLFPALVVEDLVPGSRLGPTLMCLLSTQFKRLRDGDRLWYENPGVFSPAQLTQIKQTSLARILCDNADNITRVQSDVFRVAEFPHGYGSCDEIPRVDLRVWQDCCEDCRTRGQFNAFSYHFRGRRSLEFSYQEDKPTKKTRPRKIPSVGRQGEHLSNSTSAFSTRSDASGTNDFREFVLEMQKTITDLRTQIKKLESRLSTTECVDAGGESHANNTKWKKDACTICECKDGQVTCFVEACPPATCAVPVNIPGACCPVCLQKRAEEKP

SEQ ID NO: 708 - protein, 492 aa, Homo sapiens
MANNYKKIVLLKGLEVINDYHFRIVKSLLSNDLKLNPKMKEEYDKIQIADLMEEKFPGDAGLGKLIEFFKEIPTLGDLAETLKREKLKVANKIESIPVKGIIPSKKTKQKEVYPATPACTPSNRLTAKGAEETLGPQKRKKPSEEETGTKRSKMSKEQTRPSCSAGASTSTAMGRSPPPQTSSSAPPNTSSTESLKPLANRHATASKNIFREDPIIAMVLNATKVFKYESSENEQRRMFHATVATQTQFFHVKVLNINLKRKFIKKRIIIISNYSKRNSLLEVNEASSVSEAGPDQTFEVPKDIIRRAKKIPKINILHKQTSGYIVYGLFMLHTKIVNRKTTIYEIQDKTGSMAVVGKGECHNIPCEKGDKLRLFCFRLRKRENMSKLMSEMHSFIQIQKNTNQRSHDSRSMALPQEQSQHPKPSEASTTLPESHLKTPQMPPTTPSSSSFTKKDETHPGAQSSPANFRITSPTVAPPLSSDTSTNRHPAVP

SEQ ID NO: 709 - protein, 653 aa, Homo sapiens
MALVRGAEPAAGPSRWLPTHVQVTVLRARGLRGKSSGAGSTSDAYTVIQVGREKYSTSVVEKTHGCPEWREECSFELPPGALDGLLRAQEADAGPAPWAASSAAACELVLTTMHRSLIGVDKFLGQATVALDEVFGAGRAQHTQWYKLHSKPGKKEKERGEIEVTIQFTRNNLSASMFDLSMKDKPRSPFSKIRDKMKGKKKYDLESASAILPSSAIEDPDLGSLGKMGKAKGFFLRNKLRKSSLTQSNTSLGSDSTLSSASGSLAYQGPGAELLTRSPSRSSWLSTEGGRDSAQSPKLFTHKRTYSDEANQMRVAPPRALLDLQGHLDAASRSSLCVNGSHIYNEEPQGPVRHRSSISGSLPSSGSLQAVSSRFSEEGPRSTDDTWPRGSRSNSSSEAVLGQEELSAQAKVLAPGASHPGEEEGARLPEGKPVQVATPIVASSEAVAEKEGARKEERKPRMGLFHHHHQGLSRSELGRRSSLGEKGGPILGASPHHSSSGEEKAKSSWFGLREAKDPTQKPSPHPVKPLSAAPVEGSPDRKQSRSSLSIALSSGLEKLKTVTSGSIQPVTQAPQAGQMVDTKRLKDSAVLDQSAKYYHLTHDELISLLLQRERELSQRDEHVQELESYIDRLLVRIMETSPTLLQIPPGPPK

SEQ ID NO: 710 - protein, 217 aa, Homo sapiens
MHFSSSARAADENFDYLFKIILIGDSNVGKTCVVQHFKSGVYTETQQNTIGVDFTVRSLDIDGKKVKMQVWDTAGQERFRTITQSYYRSAHAAIIAYDLTRRSTFESIPHWIHEIEKYGAANVVIMLIGNKCDLWEKRHVLFEDACTLAEKYGLLAVLETSAKESKNIEEVFVLMAKELIARNSLHLYGESALNGLPLDSSPVLMAQGPSEKTHCTC

SEQ ID NO: 711 - protein, 212 aa, Homo sapiens
MAYAYLFKYIIIGDTGVGKSCLLLQFTDKRFQPVHDLTIGVEFGARMITIDGKQIKLQIWDTAGQESFRSITRSYYRGAAGALLVYDITRRDTFNHLTTWLEDARQHSNSNMVIMLIGNKSDLESRREVKKEEGEAFAREHGLIFMETSAKTASNVEEAFINTAKEIYEKIQEGVFDINNEANGIKIGPQHAATNATHAGNQGGQQAGGGCC

SEQ ID NO: 712 - protein, 213 aa, Homo sapiens
MEAIWLYQFRLIVIGDSTVGKSCLIRRFTEGRFAQVSDPTVGVDFFSRLVEIEPGKRIKLQIWDTAGQERFRSITRAYYRNSVGGLLLFDITNRRSFQNVHEWLEETKVHVQPYQIVFVLVGHKCDLDTQRQVTRHEAEKLAAAYGMKYIETSARDAINVEKAFTDLTRDIYELVKRGEITIQEGWEGVKSGFVPNVVHSSEEVVKSERRCLC

SEQ ID NO: 713 - protein, 212 aa, Homo sapiens
MAGPGPGPGDPDEQYDFLFKLVLVGDASVGKTCVVQRFKTGAFSERQGSTIGVDFTMKTLEIQGKRVKLQIWDTAGQERFRTITQSYYRSANGAILAYDITKRSSFLSVPHWIEDVRKYAGSNIVQLLIGNKSDLSELREVSLAEAQSLAEHYDILCAIETSAKDSSNVEEAFLRVATELIMRHGGPLFSEKSPDHIQLNSKDIGEGWGCGC

SEQ ID NO: 714 - protein, 1906 aa, Homo sapiens
MQSFRERCGFHGKQQNYQQTSQETSRLENYRQPSQAGLSCDRQRLLAKDYYNPQPYPSYEGGAGTPSGTAAAVAADKYHRGSKALPTQQGLQGRPAFPGYGVQDSSPYPGRYAGEESLQAWGAPQPPPPQPQPLPAGVAKYDENLMKKTAVPPSRQYAEQGAQVPFRTHSLHVQQPPPPQQPLAYPKLQRQKLQNDIASPLPFPQGTHFPQHSQSFPTSSTYSSSVQGGGQGAHSYKSCTAPTAQPHDRPLTASSSLAPGQRVQNLHAYQSGRLSYDQQQQQQQQQQQQQQALQSRHHAQETLHYQNLAKYQHYGQQGQGYCQPDAAVRTPEQYYQTFSPSSSHSPARSVGRSPSYSSTPSPLMPNLENFPYSQQPLSTGAFPAGITDHSHFMPLLNPSPTDATSSVDTQAGNCKPLQKDKLPENLLSDLSLQSLTALTSQVENISNTVQQLLLSKAAVPQKKGVKNLVSRTPEQHKSQHCSPEGSGYSAEPAGTPLSEPPSSTPQSTHAEPQEADYLSGSEDPLERSFLYCNQARGSPARVNSNSKAKPESVSTCSVTSPDDMSTKSDDSFQSLHGSLPLDSFSKFVAGERDCPRLLLSALAQEDLASEILGLQEAIGEKADKAWAEAPSLVKDSSKPPFSLENHSACLDSVAKSAWPRPGEPEALPDSLQLDKGGNAKDFSPGLFEDPSVAFATPDPKKTTGPLSFGTKPTLGVPAPDPTTAAFDCFPDTTAASSADSANPFAWPEENLGDACPRWGLHPGELTKGLEQGGKASDGISKGDTHEASACLGFQEEDPPGEKVASLPGDFKQEEVGGVKEEAGGLLQCPEVAKADRWLEDSRHCCSTADFGDLPLLPPTSRKEDLEAEEEYSSLCELLGSPEQRPGMQDPLSPKAPLICTKEEVEEVLDSKAGWGSPCHLSGESVILLGPTVGTESKVQSWFESSLSHMKPGEEGPDGERAPGDSTTSDASLAQKPNKPAVPEAPIAKKEPVPRGKSLRSRRVHRGLPEAEDSPCRAPVLPKDLLLPESCTGPPQGQMEGAGAPGRGASEGLPRMCTRSLTALSEPRTPGPPGLTTTPAPPDKLGGKQRAAFKSGKRVGKPSPKAASSPSNPAALPVASDSSPMGSKTKETDSPSTPGKDQRSMILRSRTKTQEIFHSKRRRPSEGRLPNCRATKKLLDNSHLPATFKVSSSPQKEGRVSQRARVPKPGAGSKLSDRPLHALKRKSAFMAPVPTKKRNLVLRSRSSSSSNASGNGGDGKEERPEGSPTLFKRMSSPKKAKPTKGNGEPATKLPPPETPDACLKLASRAAFQGAMKTKVLPPRKGRGLKLEAIVQKITSPSLKKFACKAPGASPGNPLSPSLSDKDRGLKGAGGSPVGVEEGLVNVGTGQKLPTSGADPLCRNPTNRSLKGKLMNSKKLSSTDCFKTEAFTSPEALQPGGTALAPKKRSRKGRAGAHGLSKGPLEKRPYLGPALLLTPRDRASGTQGASEDNSGGGGKKPKMEELGLASQPPEGRPCQPQTRAQKQPGHTNYSSYSKRKRLTRGRAKNTTSSPCKGRAKRRRQQQVLPLDPAEPEIRLKYISSCKRLRSDSRTPAFSPFVRVEKRDAFTTICTVVNSPGDAPKPHRKPSSSASSSSSSSSFSLDAAGASLATLPGGSILQPRPSLPLSSTMHLGPVVSKALSTSCLVCCLCQNPANFKDLGDLCGPYYPEHCLPKKKPKLKEKVRPEGTCEEASLPLERTLKGPECAAAATAGKPPRPDGPADPAKQGPLRTSARGLSRRLQSCYCCDGREDGGEEAAPADKGRKHECSKEAPAEPGGEAQEHWVHEACAVWTGGVYLVAGKLFGLQEAMKVAVDMMCSSCQEAGATIGCCHKGCLHTYHYPCASDAGCIFIEENFSLKCPKHKRLP

SEQ ID NO: 715 - protein, 1088 aa, Homo sapiens
MALHFQSLAELEVLCTHLYIGTDLTQRIEAEKALLELIDSPECLSKCQLLLEQGTTSYAQLLAATCLSKLVSRVSPLPVEQRMDIRNYILNYVASQPKLAPFVIQALIQVIAKITKLGWFEVQKDQFVFREIIADVKKFLQGTVEHCIIGVIILSELTQEMNLVDYSRPSAKHRKIATSFRDTSLKDVLVLACSLLKEVFAKPLNLQDQCQQNLVMQVLKLVLNCLNFDFIGSSADESADDLCTVQIPTTWRTIFLEPETLDLFFNLYHSLPPLLSQLALSCLVQFASTRRSLFNSPERAKYLGNLIKGVKRILENPQGLSDPGNYHEFCRFLARLKTNYQLGELVMVKEYPEVIRLIANFTITSLQHWEFAPNSVHYLLTLWQRMVASVPFVKSTEPHLLDTYAPEITKAFITSRLDSVAIVVRDHLDDPLDDTATVFQQLEQLCTVSRCEYEKTCALLVQLFDQNAQNYQKLLHPYSGVTVDITIQEGRLAWLVYLVGTVVGGRLTYTSTDEHDAMDGELSCRVFQLISLMDTGLPRCCNEKIELAILWFLDQFRKTYVGDQLQRTSKVYARMSEVLGITDDNHVLETFMTKIVTNLKYWGRYEPVISRTLQFLNDLSVGYILLKKLVKIDAVKFMLKNHTSEHFPFLGISDNHSLSDFRCRTTFYTALTRLLMVDLGEDEDEFENFMLPLTVAFETVLQIFNNNFKQEDVKRMLIGLARDLRGIAFALNTKTSYTMLFDWMYPTYLPLLQNAVERWYGEPTCTTPILKLMAELMQNRSQRLNFDVSSPNGILLFREASKMVCTYGNQILSLGSLSKDQIYPMKLKGISICYSALKSALCGNYVSFGVFKLYGDNHFDNVLQAFVKMLLSVSHSDLLQYRKLSQSYYPLLECLTQDHMSFIINLEPPVLMYVLTSISEGLTTLDTVVSSSCCTSLDYIVTYLFKHIAKEGKKPLRCREATQAGQRLLHFMQQNPDVLQQMMSVLMNTIVFEDCRNQWSVSRPLLGLILLNEKYFSELRASLINSQPLPKQEVLAQCFRNLMEGVEQNLSVKNRDRFTQNLSVFRRDVAEALRSDGNTEPCSLDMMS

SEQ ID NO: 716 - protein, 1011 aa, Homo sapiens
MVAAHAAHSSSSAEWIACLDKRPLERSSEDVDIIFTRLKEVKAFEKFHPNLLHQICLCGYYENLEKGITLFRQGDIGTNWYAVLAGSLDVKVSETSSHQDAVTICTLGIGTAFGESILDNTPRHATIVTRESSELLRIEQKDFKALWEKYRQYMAGLLAPPYGVMETGSNNDRIPDKENTPLIEPHVPLRPANTITKVPSEKILRAGKILRNAILSRAPHMIRDRKYHLKTYRQCCVGTELVDWMMQQTPCVHSRTQAVGMWQVLLEDGVLNHVDQEHHFQDKYLFYRFLDDEHEDAPLPTEEEKKECDEELQDTMLLLSQMGPDAHMRMILRKPPGQRTVDDLEIIYEELLHIKALSHLSTTVKRELAGVLIFESHAKGGTVLFNQGEEGTSWYIILKGSVNVVIYGKGVVCTLHEGDDFGKLALVNDAPRAASIVLREDNCHFLRVDKEDFNRILRDVEANTVRLKEHDQDVLVLEKVPAGNRASNQGNSQPQQKYTVMSGTPEKILEHFLETIRLEATLNEATDSVLNDFIMMHCVFMPNTQLCPALVAHYHAQPSQGTEQEKMDYALNNKRRVIRLVLQWAAMYGDLLQEDDVSMAFLEEFYVSVSDDARMIAALKEQLPELEKIVKQISEDAKAPQKKHKVLLQQFNTGDERAQKRQPIRGSDEVLFKVYCMDHTYTTIRVPVATSVKEVISAVADKLGSGEGLIIVKMSSGGEKVVLKPNDVSVFTTLTINGRLFACPREQFDSLTPLPEQEGPTVGTVGTFELMSSKDLAYQMTIYDWELFNCVHELELIYHTFGRHNFKKTTANLDLFLRRFNEIQFWVVTEICLCSQLSKRVQLLKKFIKIAAHCKEYKNLNSFFAIVMGLSNVAVSRLALTWEKLPSKFKKFYAEFESLMDPSRNHRAYRLTVAKLEPPLIPFMPLLIKDMTFTHEGNKTFIDNLVNFEKMRMIANTARTVRYYRSQPFNPDAAQANKNHQDVRSYVRQLNVIDNQRTLSQMSHRLEPRRP

SEQ ID NO: 717 - protein, 281 aa, Homo sapiens
MKLAAMIKKMCPSDSELSIPAKNCYRMVILGSSKVGKTAIVSRFLTGRFEDAYTPTIEDFHRKFYSIRGEVYQLDILDTSGNHPFPAMRRLSILTGDVFILVFSLDNRDSFEEVQRLRQQILDTKSCLKNKTKENVDVPLVICGNKGDRDFYREVDQREIEQLVGDDPQRCAYFEISAKKNSSLDQMFRALFAMAKLPSEMSPDLHRKVSVQYCDVLHKKALRNKKLLRAGSGGGGGDPGDAFGIVAPFARRPSVHSDLMYIREKASAGSQAKDKERCVIS

SEQ ID NO: 718 - protein, 418 aa, Homo sapiens
MAMASPAIGQRPYPLLLDPEPPRYLQSLSGPELPPPPPDRSSRLCVPAPLSTAPGAREGRSARRAARGNLEPPPRASRPARPLRPGLQQRLRRRPGAPRPRDVRSIFEQPQDPRVPAERGEGHCFAELVLPGGPGWCDLCGREVLRQALRCTNCKFTCHPECRSLIQLDCSQQEGLSRDRPSPESTLTVTFSQNVCKPVEETQRPPTLQEIKQKIDSYNTREKNCLGMKLSEDGTYTGFIKVHLKLRRPVTVPAGIRPQSIYDAIKEVNLAATTDKRTSFYLPLDAIKQLHISSTTTVSEVIQGLLKKFMVVDNPQKFALFKRIHKDGQVLFQKLSIADRPLYLRLLAGPDTEVLSFVLKENETGEVEWDAFSIPELQNFLTILEKEEQDKIQQVQKKYDKFRQKLEEALRESQGKPG

SEQ ID NO: 719 - protein, 1594 aa, Homo sapiens
MKLYVFLVNTGTTLTFDTELTVQTVADLKHAIQSKYKIAIQHQVLVVNGGECMAADRRVCTYSAGTDTNPIFLFNKEMILCDRPPAIPKTTFSTENDMEIKVEESLMMPAVFHTVASRTQLALEMYEVAKKLCSFCEGLVHDEHLQHQGWAAIMANLEDCSNSYQKLLFKFESIYSNYLQSIEDIKLKLTHLGTAVSVMAKIPLLECLTRHSYRECLGRLDSLPEHEDSEKAEMKRSTELVLSPDMPRTTNESLLTSFPKSVEHVSPDTADAESGKEIRESCQSTVHQQDETTIDTKDGDLPFFNVSLLDWINVQDRPNDVESLVRKCFDSMSRLDPRIIRPFIAECRQTIAKLDNQNMKAIKGLEDRLYALDQMIASCGRLVNEQKELAQGFLANQKRAENLKDASVLPDLCLSHANQLMIMLQNHRKLLDIKQKCTTAKQELANNLHVRLKWCCFVMLHADQDGEKLQALLRLVIELLERVKIVEALSTVPQMYCLAVVEVVRRKMFIKHYREWAGALVKDGKRLYEAEKSKRESFGKLFRKSFLRNRLFRGLDSWPPSFCTQKPRKFDCELPDISLKDLQFLQSFCPSEVQPFLRVPLLCDFEPLHQHVLALHNLVKAAQSLDEMSQTITDLLSEQKASVSQTSPQSASSPRMESTAGITTTTSPRTPPPLTVQDPLCPAVCPLEELSPDSIDAHTFDFETIPHPNIEQTIHQVSLDLDSLAESPESDFMSAVNEFVIEENLSSPNPISDPQSPEMMVESLYSSVINAIDSRRMQDTNVCGKEDFGDHTSLNVQLERCRVVAQDSHFSIQTIKEDLCHFRTFVQKEQCDFSNSLKCTAVEIRNIIEKVKCSLEITLKEKHQKELLSLKNEYEGKLDGLIKETEENENKIKKLKGELVCLEEVLQNKDNEFALVKHEKEAVICLQNEKDQKLLEMENIMHSQNCEIKELKQSREIVLEDLKKLHVENDEKLQLLRAELQSLEQSHLKELEDTLQVRHIQEFEKVMTDHRVSLEELKKENQQIINQIQESHAEIIQEKEKQLQELKLKVSDLSDTRCKLEVELALKEAETDEIKILLEESRAQQKETLKSLLEQETENLRTEISKLNQKIQDNNENYQVGLAELRTLMTIEKDQCISELISRHEEESNILKAELNKVTSLHNQAFEIEKNLKEQIIELQSKLDSELSALERQKDEKITQQEEKYEAIIQNLEKDRQKLVSSQEQDREQLIQKLNCEKDEAIQTALKEFKLEREVVEKELLEKVKHLENQIAKSPAIDSTRGDSSSLVAELQEKLQEEKAKFLEQLEEQEKRKNEEMQNVRTSLIAEQQTNFNTVLTREKMRKENIINDLSDKLKSTMQQQERDKDLIESLSEDRARLLEEKKKLEEEVSKLRSSSFVPSPYVATAPELYGACAPELPGESDRSAVETADEGRVDSAMETSMMSVQENIHMLSEEKQRIMLLERTLQLKEEENKRLNQRLMSQSMSSVSSRHSEKIAIRDFQVGDLVLIILDERHDNYVLFTVSPTLYFLHSESLPALDLKPGEGASGASRRPWVLGKVMEKEYCQAKKAQNRFKVPLGTKFYRVKAVSWNKKV

SEQ ID NO: 720 - protein, 418 aa, Homo sapiens
MLASQGVLLHPYGVPMIVPAAPYLPGLIQGNQEAAAAPDTMAQPYASAQFAPPQNGIPAEYTAPHPHPAPEYTGQTTVPEHTLNLYPPAQTHSEQSPADTSAQTVSGTATQTDDAAPTDGQPQTQPSENTENKSQPKRLHVSNIPFRFRDPDLRQMFGQFGKILDVEIIFNERGSKGFGFVTFENSADADRAREKLHGTVVEGRKIEVNNATARVMTNKKTVNPYTNGWKLNPVVGAVYSPEFYAGTVLLCQANQEGSSMYSAPSSLVYTSAMPGFPYPAATAAAAYRGAHLRGRGRTVYNTFRAAAPPPPIPAYGGVVYQEPVYGNKLLQGGYAAYRYAQPTPATAAAYSDSYGRVYAADPYHHALAPAPTYGVGAMNAFAPLTDAKTRSHADDVGLVLSSLQASIYRGGYNRFAPY

SEQ ID NO: 721 - protein, 1060 aa, Homo sapiens
MLIEDVDALKSWLAKLLEPICDADPSALANYVVALVKKDKPEKELKAFCADQLDVFLQKETSGFVDKLFESLYTKNYLPLLEPVKPEPKPLVQEKEEIKEEVFQEPAEEERDGRKKKYPSPQKTRSESSERRTREKKREDGKWRDYDRYYERNELYREKYDWRRGRSKSRSKSRGLSRSRSRSRGRSKDRDPNRNVEHRERSKFKSERNDLESSYVPVSAPPPNSSEQYSSGAQSIPSTVTVIAPAHHSENTTESWSNYYNNHSSSNSFGRNLPPKRRCRDYDERGFCVLGDLCQFDHGNDPLVVDEVALPSMIPFPPPPPGLPPPPPPGMLMPPMPGPGPGPGPGPGPGPGPGPGPGHSMRLPVPQGHGQPPPSVVLPIPRPPITQSSLINSRDQPGTSAVPNLASVGTRLPPPLPQNLLYTVSERQPMYSREHGAAASERLQLGTPPPLLAARLVPPRNLMGSSIGYHTSVSSPTPLVPDTYEPDGYNPEAPSITSSGRSQYRQFFSRTQTQRPNLIGLTSGDMDVNPRAANIVIQTEPPVPVSINSNITRVVLEPDSRKRAMSGLEGPLTKKPWLGKQGNNNQNKPGFLRKNQYTNTKLEVKKIPQELNNITKLNEHFSKFGTIVNIQVAFKGDPEAALIQYLTNEEARKAISSTEAVLNNRFIRVLWHRENNEQPTLQSSAQLLLQQQQTLSHLSQQHHHLPQHLHQQQVLVAQSAPSTVHGGIQKMMSKPQTSGAYVLNKVPVKHRLGHAGGNQSDASHLLNQSGGAGEDCQIFSTPGHPKMIYSSSNLKTPSKLCSGSKSHDVQEVLKKKQEAMKLQQDMRKKRQEVLEKQIECQKMLISKLEKNKNMKPEERANIMKTLKELGEKISQLKDELKTSSAVSTPSKVKTKTEAQKELLDTELDLHKRLSSGEDTTELRKKLSQLQVEAARLGILPVGRGKTMSSQGRGRGRGRGGRGRGSLNHMVVDHRPKALTVGGFIEEEKEDLLQHFSTANQGPKFKDRRLQISWHKPKVPSISTETEEEEVKEEETETSDLFLPDDDDEDEDEYESRSWRR

SEQ ID NO: 722 - protein, 174 aa, Homo sapiens
MADVLDLHEAGGEDFAMDEDGDESIHKLKEKAKKRKGRGFGSEEGSRARMREDYDSVEQDGDEPGPQRSVEGWILFVTGVHEEATEEDIHDKFAEYGEIKNIHLNLDRRTGYLKGYTLVEYETYKEAQAAMEGLNGQDLMGQPISVDWCFVRGPPKGKRRGGRRRSRSPDRRRR

SEQ ID NO: 723 - protein, 437 aa, Homo sapiens
MGKRLDQPQMYPQYTYYYPHYLQTKQSYAPAPHPMAPPSPSTNSSSNNSSNNSSGEQLSKTNLYIRGLPPGTTDQDLIKLCQPYGKIVSTKAILDKNTNQCKGYGFVDFDSPAAAQKAVASLKANGVQAQMAKQQEQDPTNLYISNLPISMDEQELENMLKPFGHVISTRILRDANGVSRGVGFARMESTEKCEVVIQHFNGKYLKTPPGIPAPSEPLLCKFADGGQKKRQNQSKYTQNGRPWPREGEAGMALTYDPTAAIQNGFYSSPYSIATNRMIPQTSITPFIAASPVSTYQVQSTSWMPHPPYVMQPTGAVITPTMDHPMSMQPANMMGPLTQQMNHLSLGTTGTIQSQDRIMILHQLLCQYMTAAAPMQGTYIPQYTPVPPTAVSIEGVVADTSPQTVAPSSQDTSGQQQQIAVDTSNEHAPAYSYQQSKP

SEQ ID NO: 724 - protein, 255 aa, Homo sapiens
MVSWMISRAVVLVFGMLYPAYYSYKAVKTKNVKEYVRWMMYWIVFALYTVIETVADQTVAWFPLYYELKIAFVIWLLSPYTKGASLIYRKFLHPLLSSKEREIDDYIVQAKERGYETMVNFGRQGLNLAATAAVTAAVKSQGAITERLRSFSMHDLTTIQGDEPVGQRPYQPLPEAKKKSKPAPSESAGYGIPLKDGDEKTDEEAEGPYSDNEMLTHKGLRRSQSMKSVKTTKGRKEVRYGSLKYKVKKRPQVYF

SEQ ID NO: 725 - protein, 3460 aa, Homo sapiens
MERSGWARQTFLLALLLGATLRARAAAGYYPRFSPFFFLCTHHGELEGDGEQGEVLISLHIAGNPTYYVPGQEYHVTISTSTFFDGLLVTGLYTSTSVQASQSIGGSSAFGFGIMSDHQFGNQFMCSVVASHVSHLPTTNLSFIWIAPPAGTGCVNFMATATHRGQVIFKDALAQQLCEQGAPTDVTVHPHLAEIHSDSIILRDDFDSYHQLQLNPNIWVECNNCETGEQCGAIMHGNAVTFCEPYGPRELITTGLNTTTASVLQFSIGSGSCRFSYSDPSIIVLYAKNNSADWIQLEKIRAPSNVSTIIHILYLPEDAKGENVQFQWKQENLRVGEVYEACWALDNILIINSAHRQVVLEDSLDPVDTGNWLFFPGATVKHSCQSDGNSIYFHGNEGSEFNFATTRDVDLSTEDIQEQWSEEFESQPTGWDVLGAVIGTECGTIESGLSMVFLKDGERKLCTPSMDTTGYGNLRFYFVMGGICDPGNSHENDIILYAKIEGRKEHITLDTLSYSSYKVPSLVSVVINPELQTPATKFCLRQKNHQGHNRNVWAVDFFHVLPVLPSTMSHMIQFSINLGCGTHQPGNSVSLEFSTNHGRSWSLLHTECLPEICAGPHLPHSTVYSSENYSGWNRITIPLPNAALTRNTRIRWRQTGPILGNMWAIDNVYIGPSCLKFCSGRGQCTRHGCKCDPGFSGPACEMASQTFPMFISESFGSSRLSSYHNFYSIRGAEVSFGCGVLASGKALVFNKDGRRQLITSFLDSSQSRFLQFTLRLGSKSVLSTCRAPDQPGEGVLLHYSYDNGITWKLLEHYSYLSYHEPRIISVELPGDAKQFGIQFRWWQPYHSSQREDVWAIDEIIMTSVLFNSISLDFTNLVEVTQSLGFYLGNVQPYCGHDWTLCFTGDSKLASSMRYVETQSMQIGASYMIQFSLVMGCGQKYTPHMDNQVKLEYSTNHGLTWHLVQEECLPSMPSCQEFTSASIYHASEFTQWRRVIVLLPQKTWSSATRFRWSQSYYTAQDEWALDSIYIGQQCPNMCSGHGSCDHGICRCDQGYQGTECHPEAALPSTIMSDFENQNGWESDWQEVIGGEIVKPEQGCGVISSGSSLYFSKAGKRQLVSWDLDTSWVDFVQFYIQIGGESASCNKPDSREEGVLLQYSNNGGIQWHLLAEMYFSDFSKPRFVYLELPAAAKTPCTRFRWWQPVFSGEDYDQWAVDDIIILSEKQKQIIPVINPTLPQNFYEKPAFDYPMNQMSVWLMLANEGMVKNETFCAATPSAMIFGKSDGDRFAVTRDLTLKPGYVLQFKLNIGCANQFSSTAPVLLQYSHDAGMSWFLVKEGCYPASAGKGCEGNSRELSEPTMYHTGDFEEWTRITIVIPRSLASSKTRFRWIQESSSQKNVPPFGLDGVYISEPCPSYCSGHGDCISGVCFCDLGYTAAQGTCVSNVPNHNEMFDRFEGKLSPLWYKITGAQVGTGCGTLNDGKSLYFNGPGKREARTVPLDTRNIRLVQFYIQIGSKTSGITCIKPRTRNEGLIVQYSNDNGILWHLLRELDFMSFLEPQIISIDLPQDAKTPATAFRWWQPQHGKHSAQWALDDVLIGMNDSSQTGFQDKFDGSIDLQANWYRIQGGQVDIDCLSMDTALIFTENIGKPRYAETWDFHVSASTFLQFEMSMGCSKPFSNSHSVQLQYSLNNGKDWHLVTEECVPPTIGCLHYTESSIYTSERFQNWKRITVYLPLSTISPRTRFRWIQANYTVGADSWAIDNVVLASGCPWMCSGRGICDAGRCVCDRGFGGPYCVPVVPLPSILKDDFNGNLHPDLWPEVYGAERGNLNGETIKSGTSLIFKGEGLRMLISRDLDCTNTMYVQFSLRFIAKSTPERSHSILLQFSISGGITWHLMDEFYFPQTTNILFINVPLPYTAQTNATRFRLWQPYNNGKKEEIWIVDDFIIDGNNVNNPVMLLDTFDFGPREDNWFFYPGGNIGLYCPYSSKGAPEEDSAMVFVSNEVGEHSITTRDLNVNENTIIQFEINVGCSTDSSSADPVRLEFSRDFGATWHLLLPLCYHSSSHVSSLCSTEHHPSSTYYAGTMQGWRREVVHFGKLHLCGSVRFRWYQGFYPAGSQPVTWAIDNVYIGPQCEEMCNGQGSCINGTKCICDPGYSGPTCKISTKNPDFLKDDFEGQLESDRFLLMSGGKPSRKCGILSSGNNLFFNEDGLRMLMTRDLDLSHARFVQFFMRLGCGKGVPDPRSQPVLLQYSLNGGLSWSLLQEFLFSNSSNVGRYIALEIPLKARSGSTRLRWWQPSENGHFYSPWVIDQILIGGNISGNTVLEDDFTTLDSRKWLLHPGGTKMPVCGSTGDALVFIEKASTRYVVSTDVAVNEDSFLQIDFAASCSVTDSCYAIELEYSVDLGLSWHPLVRDCLPTNVECSRYHLQRILVSDTFNKWTRITLPLPPYTRSQATRFRWHQPAPFDKQQTWAIDNVYIGDGCIDMCSGHGRCIQGNCVCDEQWGGLYCDDPETSLPTQLKDNFNRAPSSQNWLTVNGGKLSTVCGAVASGMALHFSGGCSRLLVTVDLNLTNAEFIQFYFMYGCLITPNNRNQGVLLEYSVNGGITWNLLMEIFYDQYSKPGFVNILLPPDAKEIATRFRWWQPRHDGLDQNDWAIDNVLISGSADQRTVMLDTFSSAPVPQHERSPADAGPVGRIAFDMFMEDKTSVNEHWLFHDDCTVERFCDSPDGVMLCGSHDGREVYAVTHDLTPTEGWIMQFKISVGCKVSEKIAQNQIHVQYSTDFGVSWNYLVPQCLPADPKCSGSVSQPSVFFPTKGWKRITYPLPESLVGNPVRFRFYQKYSDMQWAIDNFYLGPGCLDNCRGHGDCLREQCICDPGYSGPNCYLTHTLKTFLKERFDSEEIKPDLWMSLEGGSTCTECGILAEDTALYFGGSTVRQAVTQDLDLRGAKFLQYWGRIGSENNMTSCHRPICRKEGVLLDYSTDGGITWTLLHEMDYQKYISVRHDYILLPEDALTNTTRLRWWQPFVISNGIVVSGVERAQWALDNILIGGAEINPSQLVDTFDDEGTSHEENWSFYPNAVRTAGFCGNPSFHLYWPNKKKDKTHNALSSRELIIQPGYMMQFKIVVGCEATSCGDLHSVMLEYTKDARSDSWQLVQTQCLPSSSNSIGCSPFQFHEATIYNSVNSSSWKRITIQLPDHVSSSATQFRWIQKGEETEKQSWAIDHVYIGEACPKLCSGHGYCTTGAICICDESFQGDDCSVFSHDLPSYIKDNFESARVTEANWETIQGGVIGSGCGQLAPYAHGDSLYFNGCQIRQAATKPLDLTRASKIMFVLQIGSMSQTDSCNSDLSGPHAVDKAVLLQYSVNNGITWHVIAQHQPKDFTQAQRVSYNVPLEARMKGVLLRWWQPRHNGTGHDQWALDHVEVVLVSTRKQNYMMNFSRQHGLRHFYNRRRRSLRRYP

SEQ ID NO: 726 - protein, 1566 aa, Homo sapiens
MTADKDKDKDKEKDRDRDRDREREKRDKARESENSRPRRSCTLEGGAKNYAESDHSEDEDNDNNSATAEESTKKNKKKPPKKKSRYERTDTGEITSYITEDDVVYRPGDCVYIESRRPNTPYFICSIQDFKLVHNSQACCRSPTPALCDPPACSLPVASQPPQHLSEAGRGPVGSKRDHLLMNVKWYYRQSEVPDSVYQHLVQDRHNENDSGRELVITDPVIKNRELFISDYVDTYHAAALRGKCNISHFSDIFAAREFKARVDSFFYILGYNPETRRLNSTQGEIRVGPSHQAKLPDLQPFPSPDGDTVTQHEELVWMPGVNDCDLLMYLRAARSMAAFAGMCDGGSTEDGCVAASRDDTTLNALNTLHESGYDAGKALQRLVKKPVPKLIEKCWTEDEVKRFVKGLRQYGKNFFRIRKELLPNKETGELITFYYYWKKTPEAASSRAHRRHRRQAVFRRIKTRTASTPVNTPSRPPSSEFLDLSSASEDDFDSEDSEQELKGYACRHCFTTTSKDWHHGGRENILLCTDCRIHFKKYGELPPIEKPVDPPPFMFKPVKEEDDGLSGKHSMRTRRSRGSMSTLRSGRKKQPASPDGRTSPINEDIRSSGRNSPSAASTSSNDSKAETVKKSAKKVKEEASSPLKSNKRQREKVASDTEEADRTSSKKTKTQEISRPNSPSEGEGESSDSRSVNDEGSSDPKDIDQDNRSTSPSIPSPQDNESDSDSSAQQQMLQAQPPALQAPTGVTPAPSSAPPGTPQLPTPGPTPSATAVPPQGSPTASQAPNQPQAPTAPVPHTHIQQAPALHPQRPPSPHPPPHPSPHPPLQPLTGSAGQPSAPSHAQPPLHGQGPPGPHSLQAGPLLQHPGPPQPFGLPPQASQGQAPLGTSPAAAYPHTSLQLPASQSALQSQQPPREQPLPPAPLAMPHIKPPPTTPIPQLPAPQAHKHPPHLSGPSPFSMNANLPPPPALKPLSSLSTHHPPSAHPPPLQLMPQSQPLPSSPAQPPGLTQSQNLPPPPASHPPTGLHQVAPQPPFAQHPFVPGGPPPITPPTCPSTSTPPAGPGTSAQPPCSGAAASGGSIAGGSSCPLPTVQIKEEALDDAEEPESPPPPPRSPSPEPTVVDTPSHASQSARFYKHLDRGYNSCARTDLYFMPLAGSKLAKKREEAIEKAKREAEQKAREEREREKEKEKEREREREREREAERAAKASSSAHEGRLSDPQLSGPGHMRPSFEPPPTTIAAVPPYIGPDTPALRTLSEYARPHVMSPTNRNHPFYMPLNPTDPLLAYHMPGLYNVDPTIRERELREREIREREIRERELRERMKPGFEVKPPELDPLHPAANPMEHFARHSALTIPPTAGPHPFASFHPGLNPLERERLALAGPQLRPEMSYPDRLAAERIHAERMASLTSDPLARLQMFNVTPHHHQHSHIHSHLHLHQQDPLHQGSAGPVHPLVDPLTAGPHLARFPYPPGTLPNPLLGQPPHEHEMLRHPVFGTPYPRDLPGAIPPPMSAAHQLQAMHAQSAELQRLAMEQQWLHGHPHMHGGHLPSQEDYYSRLKKEGDKQL

SEQ ID NO: 727 - protein, 731 aa, Homo sapiens
MSGSRQAGSGSAGTSPGSSAASSVTSASSSLSSSPSPPSVAVSAAALVSGGVAQAAGSGGLGGPVRPVLVAPAVSGSGGGAVSTGLSRHSCAARPSAGVGGSSSSLGSGSRKRPLLAPLCNGLINSYEDKSNDFVCPICFDMIEEAYMTKCGHSFCYKCIHQSLEDNNRCPKCNYVVDNIDHLYPNFLVNELILKQKQRFEEKRFKLDHSVSSTNGHRWQIFQDWLGTDQDNLDLANVNLMLELLVQKKKQLEAESHAAQLQILMEFLKVARRNKREQLEQIQKELSVLEEDIKRVEEMSGLYSPVSEDSTVPQFEAPSPSHSSIIDSTEYSQPPGFSGSSQTKKQPWYNSTLASRRKRLTAHFEDLEQCYFSTRMSRISDDSRTASQLDEFQECLSKFTRYNSVRPLATLSYASDLYNGSSIVSSIEFDRDCDYFAIAGVTKKIKVYEYDTVIQDAVDIHYPENEMTCNSKISCISWSSYHKNLLASSDYEGTVILWDGFTGQRSKVYQEHEKRCWSVDFNLMDPKLLASGSDDAKVKLWSTNLDNSVASIEAKANVCCVKFSPSSRYHLAFGCADHCVHYYDLRNTKQPIMVFKGHRKAVSYAKFVSGEEIVSASTDSQLKLWNVGKPYCLRSFKGHINEKNFVGLASNGDYIACGSENNSLYLYYKGLSKTLLTFKFDTVKSVLDKDRKEDDTNEFVSAVCWRALPDGESNVLIAANSQGTIKVLELV

SEQ ID NO: 728 - protein, 487 aa, Homo sapiens
MAQGNNYGQTSNGVADESPNMLVYRKMEDVIARMQDEKNGIPIRTVKSFLSKIPSVFSGSDIVQWLIKNLTIEDPVEALHLGTLMAAHGYFFPISDHVLTLKDDGTFYRFQTPYFWPSNCWEPENTDYAVYLCKRTMQNKARLELADYEAESLARLQRAFARKWEFIFMQAEAQAKVDKKRDKIERKILDSQERAFWDVHRPVPGCVNTTEVDIKKSSRMRNPHKTRKSVYGLQNDIRSHSPTHTPTPETKPPTEDELQQQIKYWQIQLDRHRLKMSKVADSLLSYTEQYLEYDPFLLPPDPSNPWLSDDTTFWELEASKEPSQQRVKRWGFGMDEALKDPVGREQFLKFLESEFSSENLRFWLAVEDLKKRPIKEVPSRVQEIWQEFLAPGAPSAINLDSKSYDKTTQNVKEPGRYTFEDAQEHIYKLMKSDSYPRFIRSSAYQELLQAKKKSGNSMDRRTSFEKFAQNVGKSLTSKRLTSLAQSY

SEQ ID NO: 729 - protein, 184 aa, Homo sapiens
MARSLVHDTVFYCLSVYQVKISPTPQLGAASSAEGHVGQGAPGLMGNMNPEGGVNHENGMNRDGGMIPEGGGGNQEPRQQPQPPPEEPAQAAMEGPQPENMQPRTRRTKFTLLQVEELESVFRHTQYPDVPTRRELAENLGVTEDKVRVWFKNKRARCRRHQRELMLANELRADPDDCVYIVVD

SEQ ID NO: 730 - protein, 1692 aa, Homo sapiens
MSSAVGPRGPRPPTVPPPMQELPDLSHLTEEERNIIMAVMDRQKEEEEKEEAMLKCVVRDMAKPAACKTPRNAENQPHQPSPRLHQQFESYKEQVRKIGEEARRYQGEHKDDAPTCGICHKTKFADGCGHLCSYCRTKFCARCGGRVSLRSNNEDKVVMWVCNLCRKQQEILTKSGAWFFGSGPQQTSQDGTLSDTATGAGSEVPREKKARLQERSRSQTPLSTAAASSQDAAPPSAPPDRSKGAEPSQQALGPEQKQASSRSRSEPPRERKKTPGLSEQNGKGALKSERKRVPKTSAQPVEGAVEERERKERRESRRLEKGRSQDYPDTPEKRDEGKAADEEKQRKEEDYQTRYRSDPNLARYPVKPPPEEQQMRMHARVSRARHERRHSDVALPRTEAGAALPEGKAGKRAPAAARASPPDSPRAYSAERTAETRAPGAKQLTNHSPPAPRHGPVPAEAPELKAQEPLRKQSRLDPSSAVLMRKAKREKVETMLRNDSLSSDQSESVRPSPPKPHRSKRGGKKRQMSVSSSEEEGVSTPEYTSCEDVELESESVSEKGDLDYYWLDPATWHSRETSPISSHPVTWQPSKEGDRLIGRVILNKRTTMPKDSGALLGLKVVGGKMTDLGRLGAFITKVKKGSLADVVGHLRAGDEVLEWNGKPLPGATNEEVYNIILESKSEPQVEIIVSRPIGDIPRIPESSHPPLESSSSSFESQKMERPSISVISPTSPGALKDAPQVLPGQLSVKLWYDKVGHQLIVNVLQATDLPARVDGRPRNPYVKMYFLPDRSDKSKRRTKTVKKILEPKWNQTFVYSHVHRRDFRERMLEITVWDQPRVQEEESEFLGEILIELETALLDDEPHWYKLQTHDESSLPLPQPSPFMPRRHIHGESSSKKLQRSQRISDSDISDYEVDDGIGVVPPVGYRSSARESKSTTLTVPEQQRTTHHRSRSVSPHRGNDQGKPRSRLPNVPLQRSLDEIHPTRRSRSPTRHHDASRSPVDHRTRDVDSQYLSEQDSELLMLPRAKRGRSAECLHTTRHLVRHYKTLPPKMPLLQSSSHWNIYSSILPAHTKTKSVTRQDISLHHECFNSTVLRFTDEILVSELQPFLDRARSASTNCLRPDTSLHSPERERGRWSPSLDRRRPPSPRIQIQHASPENDRHSRKSERSSIQKQTRKGTASDAERVLPTCLSRRGHAAPRATDQPVIRGKHPARSRSSEHSSIRTLCSMHHLVPGGSAPPSPLLTRMHRQRSPTQSPPADTSFSSRRGRQLPQVPVRSGSIEQASLVVEERTRQMKMKVHRFKQTTGSGSSQELDREQYSKYNIHKDQYRSCDNVSAKSSDSDVSDVSAISRTSSASRLSSTSFMSEQSERPRGRISSFTPKMQGRRMGTSGRSIMKSTSVSGEMYTLEHNDGSQSDTAVGTVGAGGKKRRSSLSAKVVAIVSRRSRSTSQLSQTESGHKKLKSTIQRSTETGMAAEMRKMVRQPSRESTDGSINSYSSEGNLIFPGVRLGADSQFSDFLDGLGPAQLVGRQTLATPAMGDIQIGMEDKKGQLEVEVIRARSLTQKPGSKSTPAPYVKVYLLENGACIAKKKTRIARKTLDPLYQQSLVFDESPQGKVLQVIVWGDYGRMDHKCFMGVAQILLEELDLSSMVIGWYKLFPPSSLVDPTLTPLTRRASQSSLESSTGPPCIRS

SEQ ID NO: 731 - protein, 308 aa, Homo sapiens
MFNGEPGPASSGASRNVVRSSSISGEICGSQQAGGGAGTTTAKKRRSSLGAKMVAIVGLTQWSKSTLQLPQPEGATKKLRSNIRRSTETGIAVEMRSRVTRQGSRESTDGSTNSNSSDGTFIFPTTRLGAESQFSDFLDGLGPAQIVGRQTLATPPMGDVHIAIMDRSGQLEVEVIEARGLTPKPGSKSLPATYIKVYLLENGACLAKKKTKMTKKTCDPLYQQALLFDEGPQGKVLQVIVWGDYGRMDHKCFMGMAQIMLDELDLSAAVTGWYKLFPTSSVADSTLGSLTRRLSQSSLESATSPSCS

SEQ ID NO: 732 - protein, 217 aa, Homo sapiens
MEVENEASCSPGSASGGSREYKVVMLGAGGVGKSAMTMQFISHQFPDYHDPTIEDAYKTQVRIDNEPAYLDILDTAGQAEFTAMREQYMRGGEGFIICYSVTDRQSFQEAAKFKELIFQVRHTYEIPLVLVGNKIDLEQFRQVSTEEGLSLAQEYNCGFFETSAALRFCIDDAFHGLVREIRKKESMPSLMEKKLKRKDSLWKKLKGSLKKKRENMT

SEQ ID NO: 733 - protein, 624 aa, Homo sapiens
MENSDSNDKGSGDQSAAQRRSQMDRLDREEAFYQFVNNLSEEDYRLMRDNNLLGTPGESTEEELLRRLQQIKEGPPPQNSDENRGGDSSDDVSNGDSIIDWLNSVRQTGNTTRSGQRGNQSWRAVSRTNPNSGDFRFSLEINVNRNNGSQNSENENEPSARRSSGENVENNSQRQVENPRSESTSARPSRSERNSTEALTEVPPTRGQRRARSRSPDHRRTRARAERSRSPLHPMSEIPRRSHHSISSQTFEHPLVNETEGSSRTRHHVTLRQQISGPELLSRGLFAASGTRNASQGAGSSDTAASGESTGSGQRPPTIVLDLQVRRVRPGEYRQRDSIASRTRSRSQTPNNTVTYESERGGFRRTFSRSERAGVRTYVSTIRIPIRRILNTGLSETTSVAIQTMLRQIMTGFGELSYFMYSDSDSEPTGSVSNRNMERAESRSGRGGSGGGSSSGSSSSSSSSSSSSSSSSSSSSPSSSSGGESSETSSDLFEGSNEGSSSSGSSGARREGRHRAPVTFDESGSLPFLSLAQFFLLNEDDDDQPRGLTKEQIDNLAMRSFGENDALKTCSVCITEYTEGNKLRKLPCSHEYHVHCIDRWLSENSTCPICRRAVLASGNRESVV

SEQ ID NO: 734 - protein, 432 aa, Homo sapiens
MAGLGLGSAVPVWLAEDDLGCIICQGLLDWPATLPCGHSFCRHCLEALWGARDARRWACPTCRQGAAQQPHLRKNTLLQDLADKYRRAAREIQAGSDPAHCPCPGSSSLSSAAARPRRRPELQRVAVEKSITEVAQELTELVEHLVDIVRSLQNQRPLSESGPDNELSILGKAFSSGVDLSMASPKLVTSDTAAGKIRDILHDLEEIQEKLQESVTWKEAPEAQMQGELLEAPSSSSCPLPDQSHPALRRASRFAQWAIHPTFNLKSLSCSLEVSKDSRTVTVSHRPQPYRWSCERFSTSQVLCSQALSSGKHYWEVDTRNCSHWAVGVASWEMSRDQVLGRTMDSCCVEWKGTSQLSAWHMVKETVLGSDRPGVVGIWLNLEEGKLAFYSVDNQEKLLYECTISASSPLYPAFWLYGLHPGNYLIIKQVKV

SEQ ID NO: 735 - protein, 305 aa, Homo sapiens
MDLSGVKKKSLLGVKENNKKSSTRAPSPTKRKDRSDEKSKDRSKDKGATKESSEKDRGRDKTRKRRSASSGSSSTRSRSSSTSSSGSSTSTGSSSGSSSSSASSRSGSSSTSRSSSSSSSSGSPSPSRRRHDNRRRSRSKSKPPKRDEKERKRRSPSPKPTKVHIGRLTRNVTKDHIMEIFSTYGKIKMIDMPVERMHPHLSKGYAYVEFENPDEAEKALKHMDGGQIDGQEITATAVLAPWPRPPPRRFSPPRRMLPPPPMWRRSPPRMRRRSRSPRRRSPVRRRSRSPGRRRHRSRSSSNSSR

SEQ ID NO: 736 - protein, 1651 aa, Homo sapiens
MKWKHVPFLVMISLLSLSPNHLFLAQLIPDPEDVERGNDHGTPIPTSDNDDNSLGYTGSRLRQEDFPPRIVEHPSDLIVSKGEPATLNCKAEGRPTPTIEWYKGGERVETDKDDPRSHRMLLPSGSLFFLRIVHGRKSRPDEGVYVCVARNYLGEAVSHNASLEVAILRDDFRQNPSDVMVAVGEPAVMECQPPRGHPEPTISWKKDGSPLDDKDERITIRGGKLMITYTRKSDAGKYVCVGTNMVGERESEVAELTVLERPSFVKRPSNLAVTVDDSAEFKCEARGDPVPTVRWRKDDGELPKSRYEIRDDHTLKIRKVTAGDMGSYTCVAENMVGKAEASATLTVQEPPHFVVKPRDQVVALGRTVTFQCEATGNPQPAIFWRREGSQNLLFSYQPPQSSSRFSVSQTGDLTITNVQRSDVGYYICQTLNVAGSIITKAYLEVTDVIADRPPPVIRQGPVNQTVAVDGTFVLSCVATGSPVPTILWRKDGVLVSTQDSRIKQLENGVLQIRYAKLGDTGRYTCIASTPSGEATWSAYIEVQEFGVPVQPPRPTDPNLIPSAPSKPEVTDVSRNTVTLSWQPNLNSGATPTSYIIEAFSHASGSSWQTVAENVKTETSAIKGLKPNAIYLFLVRAANAYGISDPSQISDPVKTQDVLPTSQGVDHKQVQRELGNAVLHLHNPTVLSSSSIEVHWTVDQQSQYIQGYKILYRPSGANHGESDWLVFEVRTPAKNSVVIPDLRKGVNYEIKARPFFNEFQGADSEIKFAKTLEEAPSAPPQGVTVSKNDGNGTAILVSWQPPPEDTQNGMVQEYKVWCLGNETRYHINKTVDGSTFSVVIPFLVPGIRYSVEVAASTGAGSGVKSEPQFIQLDAHGNPVSPEDQVSLAQQISDVVKQPAFIAGIGAACWIILMVFSIWLYRHRKKRNGLTSTYAGIRKVPSFTFTPTVTYQRGGEAVSSGGRPGLLNISEPAAQPWLADTWPNTGNNHNDCSISCCTAGNGNSDSNLTTYSRPADCIANYNNQLDNKQTNLMLPESTVYGDVDLSNKINEMKTFNSPNLKDGRFVNPSGQPTPYATTQLIQSNLSNNMNNGSGDSGEKHWKPLGQQKQEVAPVQYNIVEQNKLNKDYRANDTVPPTIPYNQSYDQNTGGSYNSSDRGSSTSGSQGHKKGARTPKVPKQGGMNWADLLPPPPAHPPPHSNSEEYNISVDESYDQEMPCPVPPARMYLQQDELEEEEDERGPTPPVRGAASSPAAVSYSHQSTATLTPSPQEELQPMLQDCPEETGHMQHQPDRRRQPVSPPPPPRPISPPHTYGYISGPLVSDMDTDAPEEEEDEADMEVAKMQTRRLLLRGLEQTPASSVGDLESSVTGSMINGWGSASEEDNISSGRSSVSSSDGSFFTDADFAQAVAAAAEYAGLKVARRQMQDAAGRRHFHASQCPRPTSPVSTDSNMSAAVMQKTRPAKKLKHQPGHLRRETYTDDLPPPPVPPPAIKSPTAQSKTQLEVRPVVVPKLPSMDARTDRSSDRKGSSYKGREVLDGRQVVDMRTNPGDPREAQEQQNDGKGRGNKAAKRDLPPAKTHLIQEDILPYCRPTFPTSNNPRDPSSSSSMSSRGSGSRQREQANVGRRNIAEMQVLGGYERGEDNNEELEETES

SEQ ID NO: 737 - protein, 1394 aa, Homo sapiens
MARRHERVTRRMWTWAPGLLMMTVVFWGHQGNGQGQGSRLRQEDFPPRIVEHPSDVIVSKGEPTTLNCKAEGRPTPTIEWYKDGERVETDKDDPRSHRMLLPSGSLFFLRIVHGRRSKPDEGSYVCVARNYLGEAVSRNASLEVALLRDDFRQNPTDVVVAAGEPAILECQPPRGHPEPTIYWKKDKVRIDDKEERISIRGGKLMISNTRKSDAGMYTCVGTNMVGERDSDPAELTVFERPTFLRRPINQVVLEEEAVEFRCQVQGDPQPTVRWKKDDADLPRGRYDIKDDYTLRIKKTMSTDEGTYMCIAENRVGKMEASATLTVRAPPQFVVRPRDQIVAQGRTVTFPCETKGNPQPAVFWQKEGSQNLLFPNQPQQPNSRCSVSPTGDLTITNIQRSDAGYYICQALTVAGSILAKAQLEVTDVLTDRPPPIILQGPANQTLAVDGTALLKCKATGDPLPVISWLKEGFTFPGRDPRATIQEQGTLQIKNLRISDTGTYTCVATSSSGETSWSAVLDVTESGATISKNYDLSDLPGPPSKPQVTDVTKNSVTLSWQPGTPGTLPASAYIIEAFSQSVSNSWQTVANHVKTTLYTVRGLRPNTIYLFMVRAINPQGLSDPSPMSDPVRTQDISPPAQGVDHRQVQKELGDVLVRLHNPVVLTPTTVQVTWTVDRQPQFIQGYRVMYRQTSGLQATSSWQNLDAKVPTERSAVLVNLKKGVTYEIKVRPYFNEFQGMDSESKTVRTTEEAPSAPPQSVTVLTVGSYNSTSISVSWDPPPPDHQNGIIQEYKIWCLGNETRFHINKTVDAAIRSVIIGGLFPGIQYRVEVAASTSAGVGVKSEPQPIIIGRRNEVVITENNNSITEQITDVVKQPAFIAGIGGACWVILMGFSIWLYWRRKKRKGLSNYAVTFQRGDGGLMSNGSRPGLLNAGDPSYPWLADSWPATSLPVNNSNSGPNEIGNFGRGDVLPPVPGQGDKTATMLSDGAIYSSIDFTTKTSYNSSSQITQATPYATTQILHSNSIHELAVDLPDPQWKSSIQQKTDLMGFGYSLPDQNKGNNGGKGGKKKKNKNSSKPQKNNGSTWANVPLPPPPVQPLPGTELEHYAVEQQENGYDSDSWCPPLPVQTYLHQGLEDELEEDDDRVPTPPVRGVASSPAISFGQQSTATLTPSPREEMQPMLQAHLDELTRAYQFDIAKQTWHIQSNNQPPQPPVPPLGYVSGALISDLETDVADDDADDEEEALEIPRPLRALDQTPGSSMDNLDSSVTGKAFTSSQRPRPTSPFSTDSNTSAALSQSQRPRPTKKHKGGRMDQQPALPHRREGMTDEEALVPYSKPSFPSPGGHSSSGTASSKGSTGPRKTEVLRAGHQRNASDLLDIGYMGSNSQGQFTGEL

SEQ ID NO: 738 - protein, 556 aa, Homo sapiens
MNEGAPGDSDLETEARVPWSIMGHCLRTGQARMSATPTPAGEGARRDELFGILQILHQCILSSGDAFVLTGVCCSWRQNGKPPYSQKEDKEVQTGYMNAQIEIIPCKICGDKSSGIHYGVITCEGCKGFFRRSQQSNATYSCPRQKNCLIDRTSRNRCQHCRLQKCLAVGMSRDAVKFGRMSKKQRDSLYAEVQKHRMQQQQRDHQQQPGEAEPLTPTYNISANGLTELHDDLSNYIDGHTPEGSKADSAVSSFYLDIQPSPDQSGLDINGIKPEPICDYTPASGFFPYCSFTNGETSPTVSMAELEHLAQNISKSHLETCQYLREELQQITWQTFLQEEIENYQNKQREVMWQLCAIKITEAIQYVVEFAKRIDGFMELCQNDQIVLLKAGSLEVVFIRMCRAFDSQNNTVYFDGKYASPDVFKSLGCEDFISFVFEFGKSLCSMHLTEDEIALFSAFVLMSADRSWLQEKVKIEKLQQKIQLALQHVLQKNHREDGILTKLICKVSTLRALCGRHTEKLMAFKAIYPDIVRLHFPPLYKELFTSEFEPAMQIDG

SEQ ID NO: 739 - protein, 216 aa, Homo sapiens
MGRRPARCYRYCKNKPYPKSRFCRGVPDAKIRIFDLGRKKAKVDEFPLCGHMVSDEYEQLSSEALEAARICANKYMVKSCGKDGFHIRVRLHPFHVIRINKMLSCAGADRSTSQRSGASPSSMLMNLKTWWLKSGSSQMAVGSSTSPVVALWTSGGPCTHEGFQCAAPLLILTNKFYFLSTYVFVSTFLTGKELPLGTFGSLPFHFRNRLTTQPCS

SEQ ID NO: 740 - protein, 199 aa, Homo sapiens
MENFRKVRSEEAPAGCGAEGGGPGSGPFADLAPGAVHMRVKEGSKIRNLMAFATASMAQPATRAIVFSGCGRATTKTVTCAEILKRRLAGLHQVTRLRYRSVREVWQSLPPGPTQGQTPGEPAASLSVLKNVPGLAILLSKDALDPRQPGYQPPNPHPGPSSPPAAPASKRSLGEPAAGEGSAKRSQPEPGVADEDQTA

SEQ ID NO: 741 - protein, 741 aa, Homo sapiens
MPIAQLLELWKKIEVEPMEIETTEEDLNLDVEPTTEDTAEEEEGVVKEIDISHHVKEGFEKADPSQFELLKVLGQGSYGKVFLVRKVKGSDAGQLYAMKVLKKATLKVRDRVRSKMERDILAEVNHPFIVKLHYAFQTEGKLYLILDFLRGGDLFTRLSKEVMFTEEDVKFYLAELALALDHLHSLGIIYRDLKPENILLDEEGHIKITDFGLSKEAIDHDKRAYSFCGTIEYMAPEVVNRRGHTQSADWWSFGVLMFEMLTGSLPFQGKDRKETMALILKAKLGMPQFLSGEAQSLLRALFKRNPCNRLGAGIDGVEEIKRHPFFVTIDWNTLYRKEIKPPFKPAVGRPEDTFHFDPEFTARTPTDSPGVPPSANAHHLFRGFSFVASSLIQEPSQQDLHKVPVHPIVQQLHGNNIHFTDGYEIKEDIGVGSYSVCKRCVHKATDTEYAVKIIDKSKRDPSEEIEILLRYGQHPNIITLKDVYDDGKFVYLVMELMRGGELLDRILRQRYFSEREASDVLCTITKTMDYLHSQGVVHRDLKPSNILYRDESGSPESIRVCDFGFAKQLRAGNGLLMTPCYTANFVAPEVLKRQGYDAACDIWSLGILLYTMLAGFTPFANGPDDTPEEILARIGSGKYALSGGNWDSISDAAKDVVSKMLHVDPHQRLTAMQVLKHPWVVNREYLSPNQLSRQDVHLVKGAMAATYFALNRTPQAPRLEPVLSSNLAQRRGMKRLTSTRL

SEQ ID NO: 742 - protein, 740 aa, Homo sapiens
MPLAQLADPWQKMAVESPSDSAENGQQIMDEPMGEEEINPQTEEVSIKEIAITHHVKEGHEKADPSQFELLKVLGQGSFGKVFLVKKISGSDARQLYAMKVLKKATLKVRDRVRTKMERDILVEVNHPFIVKLHYAFQTEGKLYLILDFLRGGDLFTRLSKEVMFTEEDVKFYLAELALALDHLHSLGIIYRDLKPENILLDEEGHIKLTDFGLSKESIDHEKKAYSFCGTVEYMAPEVVNRRGHTQSADWWSFGVLMFEMLTGTLPFQGKDRKETMTMILKAKLGMPQFLSPEAQSLLRMLFKRNPANRLGAGPDGVEEIKRHSFFSTIDWNKLYRREIHPPFKPATGRPEDTFYFDPEFTAKTPKDSPGIPPSANAHQLFRGFSFVAITSDDESQAMQTVGVHSIVQQLHRNSIQFTDGYEVKEDIGVGSYSVCKRCIHKATNMEFAVKIIDKSKRDPTEEIEILLRYGQHPNIITLKDVYDDGKYVYVVTELMKGGELLDKILRQKFFSEREASAVLFTITKTVEYLHAQGVVHRDLKPSNILYVDESGNPESIRICDFGFAKQLRAENGLLMTPCYTANFVAPEVLKRQGYDAACDIWSLGVLLYTMLTGYTPFANGPDDTPEEILARIGSGKFSLSGGYWNSVSDTAKDLVSKMLHVDPHQRLTAALVLRHPWIVHWDQLPQYQLNRQDAPHLVKGAMAATYSALNRNQSPVLEPVGRSTLAQRRGIKKITSTAL

SEQ ID NO: 743 - protein, 346 aa, Homo sapiens
MVEKEEAGGGISEEEAAQYDRQIRLWGLEAQKRLRASRVLLVGLKGLGAEIAKNLILAGVKGLTMLDHEQVTPEDPGAQFLIRTGSVGRNRAEASLERAQNLNPMVDVKVDTEDIEKKPESFFTQFDAVCLTCCSRDVIVKVDQICHKNSIKFFTGDVFGYHGYTFANLGEHEFVEEKTKVAKVSQGVEDGPDTKRAKLDSSETTMVKKKVVFCPVKEALEVDWSSEKAKAALKRTTSDYFLLQVLLKFRTDKGRDPSSDTYEEDSELLLQIRNDVLDSLGISPDLLPEDFVRYCFSEMAPVCAVVGGILAQEIVKALSQRDPPHNNFFFFDGMKGNGIVECLGPK

SEQ ID NO: 744 - protein, 733 aa, Homo sapiens
MERRSESPCLRDSPDRRSGSPDVKGPPPVKVARLEQNGSPMGARGRPNGAVAKAVGGLMIPVFCVVEQLDGSLEYDNREEHAEFVLVRKDVLFSQLVETALLALGYSHSSAAQAQGIIKLGRWNPLPLSYVTDAPDATVADMLQDVYHVVTLKIQLQSCSKLEDLPAEQWNHATVRNALKELLKEMNQSTLAKECPLSQSMISSIVNSTYYANVSATKCQEFGRWYKKYKKIKVERVERENLSDYCVLGQRPMHLPNMNQLASLGKTNEQSPHSQIHHSTPIRNQVPALQPIMSPGLLSPQLSPQLVRQQIAMAHLINQQIAVSRLLAHQHPQAINQQFLNHPPIPRAVKPEPTNSSVEVSPDIYQQVRDELKRASVSQAVFARVAFNRTQGLLSEILRKEEDPRTASQSLLVNLRAMQNFLNLPEVERDRIYQDERERSMNPNVSMVSSASSSPSSSRTPQAKTSTPTTDLPIKVDGANINITAAIYDEIQQEMKRAKVSQALFAKVAANKSQGWLCELLRWKENPSPENRTLWENLCTIRRFLNLPQHERDVIYEEESRHHHSERMQHVVQLPPEPVQVLHRQQSQPAKESSPPREEAPPPPPPTEDSCAKKPRSRTKISLEALGILQSFIHDVGLYPDQEAIHTLSAQLDLPKHTIIKFFQNQRYHVKHHGKLKEHLGSAVDVAEYKDEELLTESEENDSEEGSEEMYKVEAEEENADKSKAAPAEIDQR

SEQ ID NO: 745 - protein, 1893 aa, Homo sapiens
MARLADYFVLVAFGPHPRGSGEGQGQILQRFPEKDWEDNPFPQGIELFCQPSGWQLCPERNPPTFFVAVLTDINSERHYCACLTFWEPAEPSQETTRVEDATEREEEGDEGGQTHLSPTAPAPSAQLFAPKTLVLVSRLDHTEVFRNSLGLIYAIHVEGLNVCLENVIGNLLTCTVPLAGGSQRTISLGAGDRQVIQTPLADSLPVSRCSVALLFRQLGITNVLSLFCAALTEHKVLFLSRSYQRLADACRGLLALLFPLRYSFTYVPILPAQLLEVLSTPTPFIIGVNAAFQAETQELLDVIVADLDGGTVTIPECVHIPPLPEPLQSQTHSVLSMVLDPELELADLAFPPPTTSTSSLKMQDKELRAVFLRLFAQLLQGYRWCLHVVRIHPEPVIRFHKAAFLGQRGLVEDDFLMKVLEGMAFAGFVSERGVPYRPTDLFDELVAHEVARMRADENHPQRVLRHVQELAEQLYKNENPYPAVAMHKVQRPGESSHLRRVPRPFPRLDEGTVQWIVDQAAAKMQGAPPAVKAERRTTVPSGPPMTAILERCSGLHVNSARRLEVVRNCISYVFEGKMLEAKKLLPAVLRALKGRAARRCLAQELHLHVQQNRAVLDHQQFDFVVRMMNCCLQDCTSLDEHGIAAALLPLVTAFCRKLSPGVTQFAYSCVQEHVVWSTPQFWEAMFYGDVQTHIRALYLEPTEDLAPAQEVGEAPSQEDERSALDVASEQRRLWPTLSREKQQELVQKEESTVFSQAIHYANRMSYLLLPLDSSKSRLLRERAGLGDLESASNSLVTNSMAGSVAESYDTESGFEDAETCDVAGAVVRFINRFVDKVCTESGVTSDHLKGLHVMVPDIVQMHIETLEAVQRESRRLPPIQKPKLLRPRLLPGEECVLDGLRVYLLPDGREEGAGGSAGGPALLPAEGAVFLTTYRVIFTGMPTDPLVGEQVVVRSFPVAALTKEKRISVQTPVDQLLQDGLQLRSCTFQLLKMAFDEEVGSDSAELFRKQLHKLRYPPDIRATFAFTLGSAHTPGRPPRVTKDKGPSLRTLSRNLVKNAKKTIGRQHVTRKKYNPPSWEHRGQPPPEDQEDEISVSEELEPSTLTPSSALKPSDRMTMSSLVERACCRDYQRLGLGTLSSSLSRAKSEPFRISPVNRMYAICRSYPGLLIVPQSVQDNALQRVSRCYRQNRFPVVCWRSGRSKAVLLRSGGLHGKGVVGLFKAQNAPSPGQSQADSSSLEQEKYLQAVVSSMPRYADASGRNTLSGFSSAHMGSHVPSPRARVTTLSNPMAASASRRTAPRGKWGSVRTSGRSSGLGTDVGSRLAGRDALAPPQANGGPPDPGFLRPQRAALYILGDKAQLKGVRSDPLQQWELVPIEVFEARQVKASFKKLLKACVPGCPAAEPSPASFLRSLEDSEWLIQIHKLLQVSVLVVELLDSGSSVLVGLEDGWDITTQVVSLVQLLSDPFYRTLEGFRLLVEKEWLSFGHRFSHRGAHTLAGQSSGFTPVFLQFLDCVHQVHLQFPMEFEFSQFYLKFLGYHHVSRRFRTFLLDSDYERIELGLLYEEKGERRGQVPCRSVWEYVDRLSKRTPVFHNYMYAPEDAEVLRPYSNVSNLKVWDFYTEETLAEGPPYDWELAQGPPEPPEEERSDGGAPQSRRRVVWPCYDSCPRAQPDAISRLLEELQRLETELGQPAERWKDTWDRVKAAQRLEGRPDGRGTPSSLLVSTAPHHRRSLGVYLQEGPVGSTLSLSLDSDQSSGSTTSGSRQAARRSTSTLYSQFQTAESENRSYEGTLYKKGAFMKPWKARWFVLDKTKHQLRYYDHRVDTECKGVIDLAEVEAVAPGTPTMGAPKTVDEKAFFDVKTTRRVYNFCAQDVPSAQQWVDRIQSCLSDA

SEQ ID NO: 746 - protein, 684 aa, Homo sapiens
MSASGVLSFTQQGWEQVLAKVKRAVVYLDAACAESLHWGCGSTRLLEAVGGPDCHLREFEPDAIGGGAKQPKAVFVLSCLLKGRTVEILRDIICRSHFQYCVVVTTVSHAVHLTANHVPAAAAAEMEGQQPVFEQLEEKLCEWMGNMNYTAEVFHVPLLLAPVAPHFALTPAFASLFPLLPQDVHLLNSARPDKRKLGSLGDVDSTTLTPELLLQIRCLVSGLSSLCEHLGVREECFAVGSLSQVIAADLANYAPAKNRKKTAAGRASVVFVDRTLDLTGAVGHHGDNLVEKIISALPQLPGHTNDVMVNMIALTALHTEEENYNVVAPGCLSQSSDTTAKALWEALLNTKHKEAVMEVRRHLVEAASRENLPIKMSMGRVTPGQLMSYIQLFKNNLKALMNHCGLLQLGLATAQTLKHPQTAKWDNFLAFERLLLQSIGESAMSVVLNQLLPMIKPVTQRTNEDYSPEELLILLIYIYSVTGELTVDKDLCEAEEKVKKALAQVFCEESGLSPLLQKITDWDSSINLTFHKSKIAVDELFTSLRDIAGARSLLKQFKSVYVPGNHTHQASYKPLLKQVVEEIFHPERPDSVDIEHMSSGLTDLLKTGFSMFMKVSRPHPSDYPLLILFVVGGVTVSEVKMVKDLVASLKPGTQVIVLSTRLLKPLNIPELLFATDRLHPDLGF

SEQ ID NO: 747 - protein, 2009 aa, Homo sapiens
MEQTVLVPPGPDSFNFFTRESLAAIERRIAEEKAKNPKPDKKDDDENGPKPNSDLEAGKNLPFIYGDIPPEMVSEPLEDLDPYYINKKTFIVLNKGKAIFRFSATSALYILTPFNPLRKIAIKILVHSLFSMLIMCTILTNCVFMTMSNPPDWTKNVEYTFTGIYTFESLIKIIARGFCLEDFTFLRDPWNWLDFTVITFAYVTEFVDLGNVSALRTFRVLRALKTISVIPGLKTIVGALIQSVKKLSDVMILTVFCLSVFALIGLQLFMGNLRNKCIQWPPTNASLEEHSIEKNITVNYNGTLINETVFEFDWKSYIQDSRYHYFLEGFLDALLCGNSSDAGQCPEGYMCVKAGRNPNYGYTSFDTFSWAFLSLFRLMTQDFWENLYQLTLRAAGKTYMIFFVLVIFLGSFYLINLILAVVAMAYEEQNQATLEEAEQKEAEFQQMIEQLKKQQEAAQQAATATASEHSREPSAAGRLSDSSSEASKLSSKSAKERRNRRKKRKQKEQSGGEEKDEDEFQKSESEDSIRRKGFRFSIEGNRLTYEKRYSSPHQSLLSIRGSLFSPRRNSRTSLFSFRGRAKDVGSENDFADDEHSTFEDNESRRDSLFVPRRHGERRNSNLSQTSRSSRMLAVFPANGKMHSTVDCNGVVSLVGGPSVPTSPVGQLLPEVIIDKPATDDNGTTTETEMRKRRSSSFHVSMDFLEDPSQRQRAMSIASILTNTVEELEESRQKCPPCWYKFSNIFLIWDCSPYWLKVKHVVNLVVMDPFVDLAITICIVLNTLFMAMEHYPMTDHFNNVLTVGNLVFTGIFTAEMFLKIIAMDPYYYFQEGWNIFDGFIVTLSLVELGLANVEGLSVLRSFRLLRVFKLAKSWPTLNMLIKIIGNSVGALGNLTLVLAIIVFIFAVVGMQLFGKSYKDCVCKIASDCQLPRWHMNDFFHSFLIVFRVLCGEWIETMWDCMEVAGQAMCLTVFMMVMVIGNLVVLNLFLALLLSSFSADNLAATDDDNEMNNLQIAVDRMHKGVAYVKRKIYEFIQQSFIRKQKILDEIKPLDDLNNKKDSCMSNHTAEIGKDLDYLKDVNGTTSGIGTGSSVEKYIIDESDYMSFINNPSLTVTVPIAVGESDFENLNTEDFSSESDLEESKEKLNESSSSSEGSTVDIGAPVEEQPVVEPEETLEPEACFTEGCVQRFKCCQINVEEGRGKQWWNLRRTCFRIVEHNWFETFIVFMILLSSGALAFEDIYIDQRKTIKTMLEYADKVFTYIFILEMLLKWVAYGYQTYFTNAWCWLDFLIVDVSLVSLTANALGYSELGAIKSLRTLRALRPLRALSRFEGMRVVVNALLGAIPSIMNVLLVCLIFWLIFSIMGVNLFAGKFYHCINTTTGDRFDIEDVNNHTDCLKLIERNETARWKNVKVNFDNVGFGYLSLLQVATFKGWMDIMYAAVDSRNVELQPKYEESLYMYLYFVIFIIFGSFFTLNLFIGVIIDNFNQQKKKFGGQDIFMTEEQKKYYNAMKKLGSKKPQKPIPRPGNKFQGMVFDFVTRQVFDISIMILICLNMVTMMVETDDQSEYVTTILSRINLVFIVLFTGECVLKLISLRHYYFTIGWNIFDFVVVILSIVGMFLAELIEKYFVSPTLFRVIRLARIGRILRLIKGAKGIRTLLFALMMSLPALFNIGLLLFLVMFIYAIFGMSNFAYVKREVGIDDMFNFETFGNSMICLFQITTSAGWDGLLAPILNSKPPDCDPNKVNPGSSVKGDCGNPSVGIFFFVSYIIISFLVVVNMYIAVILENFSVATEESAEPLSEDDFEMFYEVWEKFDPDATQFMEFEKLSQFAAALEPPLNLPQPNKLQLIAMDLPMVSGDRIHCLDILFAFTKRVLGESGEMDALRIQMEERFMASNPSKVSYQPITTTLKRKQEEVSAVIIQRAYRRHLLKRTVKQASFTYNKNKIKGGANLLIKEDMIIDRINENSITEKTDLTMSTAACPPSYDRVTKPIVEKHEQEGKDEKAKGK

SEQ ID NO: 748 - protein, 2005 aa, Homo sapiens
MAQSVLVPPGPDSFRFFTRESLAAIEQRIAEEKAKRPKQERKDEDDENGPKPNSDLEAGKSLPFIYGDIPPEMVSVPLEDLDPYYINKKTFIVLNKGKAISRFSATPALYILTPFNPIRKLAIKILVHSLFNMLIMCTILTNCVFMTMSNPPDWTKNVEYTFTGIYTFESLIKILARGFCLEDFTFLRDPWNWLDFTVITFAYVTEFVDLGNVSALRTFRVLRALKTISVIPGLKTIVGALIQSVKKLSDVMILTVFCLSVFALIGLQLFMGNLRNKCLQWPPDNSSFEINITSFFNNSLDGNGTTFNRTVSIFNWDEYIEDKSHFYFLEGQNDALLCGNSSDAGQCPEGYICVKAGRNPNYGYTSFDTFSWAFLSLFRLMTQDFWENLYQLTLRAAGKTYMIFFVLVIFLGSFYLINLILAVVAMAYEEQNQATLEEAEQKEAEFQQMLEQLKKQQEEAQAAAAAASAESRDFSGAGGIGVFSESSSVASKLSSKSEKELKNRRKKKKQKEQSGEEEKNDRVRKSESEDSIRRKGFRFSLEGSRLTYEKRFSSPHQSLLSIRGSLFSPRRNSRASLFSFRGRAKDIGSENDFADDEHSTFEDNDSRRDSLFVPHRHGERRHSNVSQASRASRVLPILPMNGKMHSAVDCNGVVSLVGGPSTLTSAGQLLPEGTTTETEIRKRRSSSYHVSMDLLEDPTSRQRAMSIASILTNTMEELEESRQKCPPCWYKFANMCLIWDCCKPWLKVKHLVNLVVMDPFVDLAITICIVLNTLFMAMEHYPMTEQFSSVLSVGNLVFTGIFTAEMFLKIIAMDPYYYFQEGWNIFDGFIVSLSLMELGLANVEGLSVLRSFRLLRVFKLAKSWPTLNMLIKIIGNSVGALGNLTLVLAIIVFIFAVVGMQLFGKSYKECVCKISNDCELPRWHMHDFFHSFLIVFRVLCGEWIETMWDCMEVAGQTMCLTVFMMVMVIGNLVVLNLFLALLLSSFSSDNLAATDDDNEMNNLQIAVGRMQKGIDFVKRKIREFIQKAFVRKQKALDEIKPLEDLNNKKDSCISNHTTIEIGKDLNYLKDGNGTTSGIGSSVEKYVVDESDYMSFINNPSLTVTVPIAVGESDFENLNTEEFSSESDMEESKEKLNATSSSEGSTVDIGAPAEGEQPEVEPEESLEPEACFTEDCVRKFKCCQISIEEGKGKLWWNLRKTCYKIVEHNWFETFIVFMILLSSGALAFEDIYIEQRKTIKTMLEYADKVFTYIFILEMLLKWVAYGFQVYFTNAWCWLDFLIVDVSLVSLTANALGYSELGAIKSLRTLRALRPLRALSRFEGMRVVVNALLGAIPSIMNVLLVCLIFWLIFSIMGVNLFAGKFYHCINYTTGEMFDVSVVNNYSECKALIESNQTARWKNVKVNFDNVGLGYLSLLQVATFKGWMDIMYAAVDSRNVELQPKYEDNLYMYLYFVIFIIFGSFFTLNLFIGVIIDNFNQQKKKFGGQDIFMTEEQKKYYNAMKKLGSKKPQKPIPRPANKFQGMVFDFVTKQVFDISIMILICLNMVTMMVETDDQSQEMTNILYWINLVFIVLFTGECVLKLISLRYYYFTIGWNIFDFVVVILSIVGMFLAELIEKYFVSPTLFRVIRLARIGRILRLIKGAKGIRTLLFALMMSLPALFNIGLLLFLVMFIYAIFGMSNFAYVKREVGIDDMFNFETFGNSMICLFQITTSAGWDGLLAPILNSGPPDCDPDKDHPGSSVKGDCGNPSVGIFFFVSYIIISFLVVVNMYIAVILENFSVATEESAEPLSEDDFEMFYEVWEKFDPDATQFIEFAKLSDFADALDPPLLIAKPNKVQLIAMDLPMVSGDRIHCLDILFAFTKRVLGESGEMDALRIQMEERFMASNPSKVSYEPITTTLKRKQEEVSAIIIQRAYRRYLLKQKVKKVSSIYKKDKGKECDGTPIKEDTLIDKLNENSTPEKTDMTPSTTSPPSYDSVTKPEKEKFEKDKSEKEDKGKDIRESKK

SEQ ID NO: 749 - protein, 1836 aa, Homo sapiens
MARPSLCTLVPLGPECLRPFTRESLAAIEQRAVEEEARLQRNKQMEIEEPERKPRSDLEAGKNLPMIYGDPPPEVIGIPLEDLDPYYSNKKTFIVLNKGKAIFRFSATPALYLLSPFSVVRRGAIKVLIHALFSMFIMITILTNCVFMTMSDPPPWSKNVEYTFTGIYTFESLIKILARGFCVDDFTFLRDPWNWLDFSVIMMAYLTEFVDLGNISALRTFRVLRALKTITVIPGLKTIVGALIQSVKKLSDVMILTVFCLSVFALVGLQLFMGNLRQKCVRWPPPFNDTNTTWYSNDTWYGNDTWYGNEMWYGNDSWYANDTWNSHASWATNDTFDWDAYISDEGNFYFLEGSNDALLCGNSSDAGHCPEGYECIKTGRNPNYGYTSYDTFSWAFLALFRLMTQDYWENLFQLTLRAAGKTYMIFFVVIIFLGSFYLINLILAVVAMAYAEQNEATLAEDKEKEEEFQQMLEKFKKHQEELEKAKAAQALEGGEADGDPAHGKDCNGSLDTSQGEKGAPRQSSSGDSGISDAMEELEEAHQKCPPWWYKCAHKVLIWNCCAPWLKFKNIIHLIVMDPFVDLGITICIVLNTLFMAMEHYPMTEHFDNVLTVGNLVFTGIFTAEMVLKLIAMDPYEYFQQGWNIFDSIIVTLSLVELGLANVQGLSVLRSFRLLRVFKLAKSWPTLNMLIKIIGNSVGALGNLTLVLAIIVFIFAVVGMQLFGKSYKECVCKIALDCNLPRWHMHDFFHSFLIVFRILCGEWIETMWDCMEVAGQAMCLTVFLMVMVIGNLVVLNLFLALLLSSFSADSLAASDEDGEMNNLQIAIGRIKLGIGFAKAFLLGLLHGKILSPKDIMLSLGEADGAGEAGEAGETAPEDEKKEPPEEDLKKDNHILNHMGLADGPPSSLELDHLNFINNPYLTIQVPIASEESDLEMPTEEETDTFSEPEDSKKPPQPLYDGNSSVCSTADYKPPEEDPEEQAEENPEGEQPEECFTEACVQRWPCLYVDISQGRGKKWWTLRRACFKIVEHNWFETFIVFMILLSSGALAFEDIYIEQRRVIRTILEYADKVFTYIFIMEMLLKWVAYGFKVYFTNAWCWLDFLIVDVSIISLVANWLGYSELGPIKSLRTLRALRPLRALSRFEGMRVVVNALLGAIPSIMNVLLVCLIFWLIFSIMGVNLFAGKFYYCINTTTSERFDISEVNNKSECESLMHTGQVRWLNVKVNYDNVGLGYLSLLQVATFKGWMDIMYAAVDSREKEEQPQYEVNLYMYLYFVIFIIFGSFFTLNLFIGVIIDNFNQQKKKLGGKDIFMTEEQKKYYNAMKKLGSKKPQKPIPRPQNKIQGMVYDLVTKQAFDITIMILICLNMVTMMVETDNQSQLKVDILYNINMIFIIIFTGECVLKMLALRQYYFTVGWNIFDFVVVILSIVGLALSDLIQKYFVSPTLFRVIRLARIGRVLRLIRGAKGIRTLLFALMMSLPALFNIGLLLFLVMFIYSIFGMSNFAYVKKESGIDDMFNFETFGNSIICLFEITTSAGWDGLLNPILNSGPPDCDPNLENPGTSVKGDCGNPSIGICFFCSYIIISFLIVVNMYIAIILENFNVATEESSEPLGEDDFEMFYETWEKFDPDATQFIAYSRLSDFVDTLQEPLRIAKPNKIKLITLDLPMVPGDKIHCLDILFALTKEVLGDSGEMDALKQTMEEKFMAANPSKVSYEPITTTLKRKHEEVCAIKIQRAYRRHLLQRSMKQASYMYRHSHDGSGDDAPEKEGLLANTMSKMYGHENGNSSSPSPEEKGEAGDAGPTMGLMPISPSDTAWPPAPPPGQTVRPGVKESLV

SEQ ID NO: 750 - protein, 2016 aa, Homo sapiens
MANFLLPRGTSSFRRFTRESLAAIEKRMAEKQARGSTTLQESREGLPEEEAPRPQLDLQASKKLPDLYGNPPQELIGEPLEDLDPFYSTQKTFIVLNKGKTIFRFSATNALYVLSPFHPIRRAAVKILVHSLFNMLIMCTILTNCVFMAQHDPPPWTKYVEYTFTAIYTFESLVKILARGFCLHAFTFLRDPWNWLDFSVIIMAYVSENIKLGNLSALRTFRVLRALKTISVIPGLKTIVGALIQSVKKLADVMVLTVFCLSVFALIGLQLFMGNLRHKCVRNFTALNGTNGSVEADGLVWESLDLYLSDPENYLLKNGTSDVLLCGNSSDAGTCPEGYRCLKAGENPDHGYTSFDSFAWAFLALFRLMTQDCWERLYQQTLRSAGKIYMIFFMLVIFLGSFYLVNLILAVVAMAYEEQNQATIAETEEKEKRFQEAMEMLKKEHEALTIRGVDTVSRSSLEMSPLAPVNSHERRSKRRKRMSSGTEECGEDRLPKSDSEDGPRAMNHLSLTRGLSRTSMKPRSSRGSIFTFRRRDLGSEADFADDENSTAGESESHHTSLLVPWPLRRTSAQGQPSPGTSAPGHALHGKKNSTVDCNGVVSLLGAGDPEATSPGSHLLRPVMLEHPPDTTTPSEEPGGPQMLTSQAPCVDGFEEPGARQRALSAVSVLTSALEELEESRHKCPPCWNRLAQRYLIWECCPLWMSIKQGVKLVVMDPFTDLTITMCIVLNTLFMALEHYNMTSEFEEMLQVGNLVFTGIFTAEMTFKIIALDPYYYFQQGWNIFDSIIVILSLMELGLSRMSNLSVLRSFRLLRVFKLAKSWPTLNTLIKIIGNSVGALGNLTLVLAIIVFIFAVVGMQLFGKNYSELRDSDSGLLPRWHMMDFFHAFLIIFRILCGEWIETMWDCMEVSGQSLCLLVFLLVMVIGNLVVLNLFLALLLSSFSADNLTAPDEDREMNNLQLALARIQRGLRFVKRTTWDFCCGLLRQRPQKPAALAAQGQLPSCIATPYSPPPPETEKVPPTRKETRFEEGEQPGQGTPGDPEPVCVPIAVAESDTDDQEEDEENSLGTEEESSKQQESQPVSGGPEAPPDSRTWSQVSATASSEAEASASQADWRQQWKAEPQAPGCGETPEDSCSEGSTADMTNTAELLEQIPDLGQDVKDPEDCFTEGCVRRCPCCAVDTTQAPGKVWWRLRKTCYHIVEHSWFETFIIFMILLSSGALAFEDIYLEERKTIKVLLEYADKMFTYVFVLEMLLKWVAYGFKKYFTNAWCWLDFLIVDVSLVSLVANTLGFAEMGPIKSLRTLRALRPLRALSRFEGMRVVVNALVGAIPSIMNVLLVCLIFWLIFSIMGVNLFAGKFGRCINQTEGDLPLNYTIVNNKSQCESLNLTGELYWTKVKVNFDNVGAGYLALLQVATFKGWMDIMYAAVDSRGYEEQPQWEYNLYMYIYFVIFIIFGSFFTLNLFIGVIIDNFNQQKKKLGGQDIFMTEEQKKYYNAMKKLGSKKPQKPIPRPLNKYQGFIFDIVTKQAFDVTIMFLICLNMVTMMVETDDQSPEKINILAKINLLFVAIFTGECIVKLAALRHYYFTNSWNIFDFVVVILSIVGTVLSDIIQKYFFSPTLFRVIRLARIGRILRLIRGAKGIRTLLFALMMSLPALFNIGLLLFLVMFIYSIFGMANFAYVKWEAGIDDMFNFQTFANSMLCLFQITTSAGWDGLLSPILNTGPPYCDPTLPNSNGSRGDCGSPAVGILFFTTYIIISFLIVVNMYIAIILENFSVATEESTEPLSEDDFDMFYEIWEKFDPEATQFIEYSVLSDFADALSEPLRIAKPNQISLINMDLPMVSGDRIHCMDILFAFTKRVLGESGEMDALKIQMEEKFMAANPSKISYEPITTTLRRKHEEVSAMVIQRAFRRHLLQRSLKHASFLFRQQAGSGLSEEDAPEREGLIAYVMSENFSRPLGPPSSSSISSTSFPPSYDSVTRATSDNLQVRGSDYSHSEDLADFPPSPDRDRESIV

SEQ ID NO: 751 - protein, 1682 aa, Homo sapiens
MLASPEPKGLVPFTKESFELIKQHIAKTHNEDHEEEDLKPTPDLEVGKKLPFIYGNLSQGMVSEPLEDVDPYYYKKKNTFIVLNKNRTIFRFNAASILCTLSPFNCIRRTTIKVLVHPFFQLFILISVLIDCVFMSLTNLPKWRPVLENTLLGIYTFEILVKLFARGVWAGSFSFLGDPWNWLDFSVTVFEVIIRYSPLDFIPTLQTARTLRILKIIPLNQGLKSLVGVLIHCLKQLIGVIILTLFFLSIFSLIGMGLFMGNLKHKCFRWPQENENETLHNRTGNPYYIRETENFYYLEGERYALLCGNRTDAGQCPEGYVCVKAGINPDQGFTNFDSFGWALFALFRLMAQDYPEVLYHQILYASGKVYMIFFVVVSFLFSFYMASLFLGILAMAYEEEKQRVGEISKKIEPKFQQTGKELQEGNETDEAKTIQIEMKKRSPISTDTSLDVLEDATLRHKEELEKSKKICPLYWYKFAKTFLIWNCSPCWLKLKEFVHRIIMAPFTDLFLIICIILNVCFLTLEHYPMSKQTNTLLNIGNLVFIGIFTAEMIFKIIAMHPYGYFQVGWNIFDSMIVFHGLIELCLANVAGMALLRLFRMLRIFKLGKYWPTFQILMWSLSNSWVALKDLVLLLFTFIFFSAAFGMKLFGKNYEEFVCHIDKDCQLPRWHMHDFFHSFLNVFRILCGEWVETLWDCMEVAGQSWCIPFYLMVILIGNLLVLYLFLALVSSFSSCKDVTAEENNEAKNLQLAVARIKKGINYVLLKILCKTQNVPKDTMDHVNEVYVKEDISDHTLSELSNTQDFLKDKEKSSGTEKNATENESQSLIPSPSVSETVPIASGESDIENLDNKEIQSKSGDGGSKEKIKQSSSSECSTVDIAISEEEEMFYGGERSKHLKNGCRRGSSLGQISGASKKGKIWQNIRKTCCKIVENNWFKCFIGLVTLLSTGTLAFEDIYMDQRKTIKILLEYADMIFTYIFILEMLLKWMAYGFKAYFSNGWYRLDFVVVIVFCLSLIGKTREELKPLISMKFLRPLRVLSQFERMKVVVRALIKTTLPTLNVFLVCLMIWLIFSIMGVDLFAGRFYECIDPTSGERFPSSEVMNKSRCESLLFNESMLWENAKMNFDNVGNGFLSLLQVATFNGWITIMNSAIDSVAVNIQPHFEVNIYMYCYFINFIIFGVFLPLSMLITVIIDNFNKHKIKLGGSNIFITVKQRKQYRRLKKLMYEDSQRPVPRPLNKLQGFIFDVVTSQAFNVIVMVLICFQAIAMMIDTDVQSLQMSIALYWINSIFVMLYTMECILKLIAFRCFYFTIAWNIFDFMVVIFSITGLCLPMTVGSYLVPPSLVQLILLSRIIHMLRLGKGPKVFHNLMLPLMLSLPALLNIILLIFLVMFIYAVFGMYNFAYVKKEAGINDVSNFETFGNSMLCLFQVAIFAGWDGMLDAIFNSKWSDCDPDKINPGTQVRGDCGNPSVGIFYFVSYILISWLIIVNMYIVVVMEFLNIASKKKNKTLSEDDFRKFFQVWKRFDPDRTQYIDSSKLSDFAAALDPPLFMAKPNKGQLIALDLPMAVGDRIHCLDILLAFTKRVMGQDVRMEKVVSEIESGFLLANPFKITCEPITTTLKRKQEAVSATIIQRAYKNYRLRRNDKNTSDIHMIDGDRDVHATKEGAYFDKAKEKSPIQSQI

SEQ ID NO: 752 - protein, 1980 aa, Homo sapiens
MAARLLAPPGPDSFKPFTPESLANIERRIAESKLKKPPKADGSHREDDEDSKPKPNSDLEAGKSLPFIYGDIPQGLVAVPLEDFDPYYLTQKTFVVLNRGKTLFRFSATPALYILSPFNLIRRIAIKILIHSVFSMIIMCTILTNCVFMTFSNPPDWSKNVEYTFTGIYTFESLVKIIARGFCIDGFTFLRDPWNWLDFSVIMMAYITEFVNLGNVSALRTFRVLRALKTISVIPGLKTIVGALIQSVKKLSDVMILTVFCLSVFALIGLQLFMGNLRNKCVVWPINFNESYLENGTKGFDWEEYINNKTNFYTVPGMLEPLLCGNSSDAGQCPEGYQCMKAGRNPNYGYTSFDTFSWAFLALFRLMTQDYWENLYQLTLRAAGKTYMIFFVLVIFVGSFYLVNLILAVVAMAYEEQNQATLEEAEQKEAEFKAMLEQLKKQQEEAQAAAMATSAGTVSEDAIEEEGEEGGGSPRSSSEISKLSSKSAKERRNRRKKRKQKELSEGEEKGDPEKVFKSESEDGMRRKAFRLPDNRIGRKFSIMNQSLLSIPGSPFLSRHNSKSSIFSFRGPGRFRDPGSENEFADDEHSTVEESEGRRDSLFIPIRARERRSSYSGYSGYSQGSRSSRIFPSLRRSVKRNSTVDCNGVVSLIGGPGSHIGGRLLPEATTEVEIKKKGPGSLLVSMDQLASYGRKDRINSIMSVVTNTLVEELEESQRKCPPCWYKFANTFLIWECHPYWIKLKEIVNLIVMDPFVDLAITICIVLNTLFMAMEHHPMTPQFEHVLAVGNLVFTGIFTAEMFLKLIAMDPYYYFQEGWNIFDGFIVSLSLMELSLADVEGLSVLRSFRLLRVFKLAKSWPTLNMLIKIIGNSVGALGNLTLVLAIIVFIFAVVGMQLFGKSYKECVCKINQDCELPRWHMHDFFHSFLIVFRVLCGEWIETMWDCMEVAGQAMCLIVFMMVMVIGNLVVLNLFLALLLSSFSADNLAATDDDGEMNNLQISVIRIKKGVAWTKLKVHAFMQAHFKQREADEVKPLDELYEKKANCIANHTGADIHRNGDFQKNGNGTTSGIGSSVEKYIIDEDHMSFINNPNLTVRVPIAVGESDFENLNTEDVSSESDPEGSKDKLDDTSSSEGSTIDIKPEVEEVPVEQPEEYLDPDACFTEGCVQRFKCCQVNIEEGLGKSWWILRKTCFLIVEHNWFETFIIFMILLSSGALAFEDIYIEQRKTIRTILEYADKVFTYIFILEMLLKWTAYGFVKFFTNAWCWLDFLIVAVSLVSLIANALGYSELGAIKSLRTLRALRPLRALSRFEGMRVVVNALVGAIPSIMNVLLVCLIFWLIFSIMGVNLFAGKYHYCFNETSEIRFEIEDVNNKTECEKLMEGNNTEIRWKNVKINFDNVGAGYLALLQVATFKGWMDIMYAAVDSRKPDEQPKYEDNIYMYIYFVIFIIFGSFFTLNLFIGVIIDNFNQQKKKFGGQDIFMTEEQKKYYNAMKKLGSKKPQKPIPRPLNKIQGIVFDFVTQQAFDIVIMMLICLNMVTMMVETDTQSKQMENILYWINLVFVIFFTCECVLKMFALRHYYFTIGWNIFDFVVVILSIVGMFLADIIEKYFVSPTLFRVIRLARIGRILRLIKGAKGIRTLLFALMMSLPALFNIGLLLFLVMFIFSIFGMSNFAYVKHEAGIDDMFNFETFGNSMICLFQITTSAGWDGLLLPILNRPPDCSLDKEHPGSGFKGDCGNPSVGIFFFVSYIIISFLIVVNMYIAIILENFSVATEESADPLSEDDFETFYEIWEKFDPDATQFIEYCKLADFADALEHPLRVPKPNTIELIAMDLPMVSGDRIHCLDILFAFTKRVLGDSGELDILRQQMEERFVASNPSKVSYEPITTTLRRKQEEVSAVVLQRAYRGHLARRGFICKKTTSNKLENGGTHREKKESTPSTASLPSYDSVTKPEKEKQQRAEEGRRERAKRQKEVRESKC

SEQ ID NO: 753 - protein, 1977 aa, Homo sapiens
MAMLPPPGPQSFVHFTKQSLALIEQRIAERKSKEPKEEKKDDDEEAPKPSSDLEAGKQLPFIYGDIPPGMVSEPLEDLDPYYADKKTFIVLNKGKTIFRFNATPALYMLSPFSPLRRISIKILVHSLFSMLIMCTILTNCIFMTMNNPPDWTKNVEYTFTGIYTFESLVKILARGFCVGEFTFLRDPWNWLDFVVIVFAYLTEFVNLGNVSALRTFRVLRALKTISVIPGLKTIVGALIQSVKKLSDVMILTVFCLSVFALIGLQLFMGNLKHKCFRNSLENNETLESIMNTLESEEDFRKYFYYLEGSKDALLCGFSTDSGQCPEGYTCVKIGRNPDYGYTSFDTFSWAFLALFRLMTQDYWENLYQQTLRAAGKTYMIFFVVVIFLGSFYLINLILAVVAMAYEEQNQANIEEAKQKELEFQQMLDRLKKEQEEAEAIAAAAAEYTSIRRSRIMGLSESSSETSKLSSKSAKERRNRRKKKNQKKLSSGEEKGDAEKLSKSESEDSIRRKSFHLGVEGHRRAHEKRLSTPNQSPLSIRGSLFSARRSSRTSLFSFKGRGRDIGSETEFADDEHSIFGDNESRRGSLFVPHRPQERRSSNISQASRSPPMLPVNGKMHSAVDCNGVVSLVDGRSALMLPNGQLLPEGTTNQIHKKRRCSSYLLSEDMLNDPNLRQRAMSRASILTNTVEELEESRQKCPPWWYRFAHKFLIWNCSPYWIKFKKCIYFIVMDPFVDLAITICIVLNTLFMAMEHHPMTEEFKNVLAIGNLVFTGIFAAEMVLKLIAMDPYEYFQVGWNIFDSLIVTLSLVELFLADVEGLSVLRSFRLLRVFKLAKSWPTLNMLIKIIGNSVGALGNLTLVLAIIVFIFAVVGMQLFGKSYKECVCKINDDCTLPRWHMNDFFHSFLIVFRVLCGEWIETMWDCMEVAGQAMCLIVYMMVMVIGNLVVLNLFLALLLSSFSSDNLTAIEEDPDANNLQIAVTRIKKGINYVKQTLREFILKAFSKKPKISREIRQAEDLNTKKENYISNHTLAEMSKGHNFLKEKDKISGFGSSVDKHLMEDSDGQSFIHNPSLTVTVPIAPGESDLENMNAEELSSDSDSEYSKVRLNRSSSSECSTVDNPLPGEGEEAEAEPMNSDEPEACFTDGCVRRFSCCQVNIESGKGKIWWNIRKTCYKIVEHSWFESFIVLMILLSSGALAFEDIYIERKKTIKIILEYADKIFTYIFILEMLLKWIAYGYKTYFTNAWCWLDFLIVDVSLVTLVANTLGYSDLGPIKSLRTLRALRPLRALSRFEGMRVVVNALIGAIPSIMNVLLVCLIFWLIFSIMGVNLFAGKFYECINTTDGSRFPASQVPNRSECFALMNVSQNVRWKNLKVNFDNVGLGYLSLLQVATFKGWTIIMYAAVDSVNVDKQPKYEYSLYMYIYFVVFIIFGSFFTLNLFIGVIIDNFNQQKKKLGGQDIFMTEEQKKYYNAMKKLGSKKPQKPIPRPGNKIQGCIFDLVTNQAFDISIMVLICLNMVTMMVEKEGQSQHMTEVLYWINVVFIILFTGECVLKLISLRHYYFTVGWNIFDFVVVIISIVGMFLADLIETYFVSPTLFRVIRLARIGRILRLVKGAKGIRTLLFALMMSLPALFNIGLLLFLVMFIYAIFGMSNFAYVKKEDGINDMFNFETFGNSMICLFQITTSAGWDGLLAPILNSKPPDCDPKKVHPGSSVEGDCGNPSVGIFYFVSYIIISFLVVVNMYIAVILENFSVATEESTEPLSEDDFEMFYEVWEKFDPDATQFIEFSKLSDFAAALDPPLLIAKPNKVQLIAMDLPMVSGDRIHCLDILFAFTKRVLGESGEMDSLRSQMEERFMSANPSKVSYEPITTTLKRKQEDVSATVIQRAYRRYRLRQNVKNISSIYIKDGDRDDDLLNKKDMAFDNVNENSSPEKTDATSSTTSPPSYDSVTKPDKEKYEQDRTEKEDKGKDSKESKK

SEQ ID NO: 754 - protein, 201 aa, Homo sapiens
MRRAWILLTLGLVACVSAESRAELTSDKDMYLDNSSIEEASGVYPIDDDDYASASGSGADEDVESPELTTSRPLPKILLTSAAPKVETTTLNIQNKIPAQTKSPEETDKEKVHLSDSERKMDPAEEDTNVYTEKHSDSLFKRTEVLAAVIAGGVIGFLFAIFLILLLVYRMRKKDEGSYDLGERKPSSAAYQKAPTKEFYA

SEQ ID NO: 755 - protein, 2213 aa, Homo sapiens
MARGARPSAAGGGGGGAEPPERAGPGRPRGSPPGRARPSLAPRPGPEPSRPRAAPETSGGDTAGAGRCGGRRAAKLGPGRRGWWALLALQLHLLRALAQDDVAPYFKTEPGLPQIHLEGNRLVLTCLAEGSWPLEFKWMRDDSELTTYSSEYKYIIPSLQKLDAGFYRCVVRNRMGALLQRKSEVQVAYMGSFMDTDQRKTVSQGRAAILNLLPITSYPRPQVTWFREGHKIIPSNRIAITLENQLVILATTTSDAGAYYVQAVNEKNGENKTSPFIHLSIARDVGTPETMAPTIVVPPGNRSVVAGSSETTLECIASARPVEDLSVTWKRNGVRITSGLHSFGRRLTISNPTSADTGPYVCEAALPGSAFEPARATAFLFIIEPPYFTAEPESRISAEVEETVDIGCQAMGVPLPTLQWYKDAISISRLQNPRYKVLASGGLRIQKLRPEDSGIFQCFASNEGGEIQTHTYLDVTNIAPVFTQRPVDTTVTDGMTAILRCEVSGAPKPAITWKRENHILASGSVRIPRFMLLESGGLQIAPVFIQDAGNYTCYAANTEGSLNASATLTVWNRTSIVHPPEDHVVIKGTTATLHCGATHDPRVSLRYVWKKDNVALTPSSTSRIVVEKDGSLLISQTWSGDIGDYSCEIVSEGGNDSRMARLEVIELPHSPQNLLVSPNSSHSHAVVLSWVRPFDGNSPILYYIVELSENNSPWKVHLSNVGPEMTGVTVSGLTPARTYQFRVCAVNEVGRGQYSAETSRLMLPEEPPSAPPKNIVASGRTNQSIMVQWQPPPETEHNGVLRGYILRYRLAGLPGEYQQRNITSPEVNYCLVTDLIIWTQYEIQVAAYNGAGLGVFSRAVTEYTLQGVPTAPPQNVQTEAVNSTTIQFLWNPPPQQFINGINQGYKLLAWPADAPEAVTVVTIAPDFHGVHHGHITNLKKFTAYFTSVLCFTTPGDGPPSTPQLVWTQEDKPGAVGHLSFTEILDTSLKVSWQEPLEKNGIITGYQISWEVYGRNDSRLTHTLNSTTHEYKIQGLSSLTTYTIDVAAVTAVGTGLVTSSTISSGVPPDLPGAPSNLVISNISPRSATLQFRPGYDGKTSISRWIVEGQVGAIGDEEEWVTLYEEENEPDAQMLEIPNLTPYTHYRFRMKQVNIVGPSPYSPSSRVIQTLQAPPDVAPTSVTVRTASETSLRLRWVPLPDSQYNGNPESVGYRIKYWRSDLQSSAVAQVVSDRLEREFTIEELEEWMEYELQMQAFNAVGAGPWSEVVRGRTRESVPSAAPENVSAEAVSSTQILLTWTSVPEQDQNGLILGYKILFRAKDLDPEPRSHIVRGNHTQSALLAGLRKFVLYELQVLAFTRIGNGVPSTPLILERTKDDAPGPPVRLVFPEVRLTSVRIVWQPPEEPNGIILGYQIAYRLASSSPHTFTTVEVGATVRQFTATDLAPESAYIFRLSAKTRQGWGEPLEATVITTEKRERPAPPRELLVPQAEVTARSLRLQWVPGSDGASPIRYFTMQVRELPRGEWQTYSSSISHEATACVVDRLRPFTSYKLRLKATNDIGDSDFSSETEAVTTLQDVPGEPPGSVSATPHTTSSVLIQWQPPRDESLNGLLQGYRIYYRELEYEAGSGTEAKTLKNPIALHAELTAQSSFKTVNSSSTSTMCELTHLKKYRRYEVIMTAYNIIGESPASAPVEVFVGEAAPAMAPQNVQVTPLTASQLEVTWDPPPPESQNGNIQGYKIYYWEADSQNETEKMKVLFLPEPVVRLKNLTSHTKYLVSISAFNAAGDGPKSDPQQGRTHQAAPGAPSFLAFSEITSTTLNVSWGEPAAANGILQGYRVVYEPLAPVQGVSKVVTVEVRGNWQRWLKVRDLTKGVTYFFRVQARTITYGPELQANITAGPAEGSPGSPRDVLVTKSASELTLQWTEGHSGDTPTTGYVIEARPSDEGLWDMFVKDIPRSATSYTLSLDKLRQGVTYEFRVVAVNEAGYGEPSNPSTAVSAQVEAPFYEEWWFLLVMALSSLIVILLVVFALVLHGQNKKYKNCSTGKGISTMEESVTLDNGGFAALELSSRHLNVKSTFSKKNGTRSPPRPSPGGLHYSDEDICNKYNGAVLTESVSLKEKSADASESEATDSDYEDALPKHSFVNHYMSDPTYYNSWKRRAQGRAPAPHRYEAVAGSEAGAQLHPVITTQSAGGVYTPAGPGARTPLTGFSSFV

SEQ ID NO: 756 - protein, 1074 aa, Homo sapiens
MKGTCVIAWLFSSLGLWRLAHPEAQGTTQCQRTEHPVISYKEIGPWLREFRAKNAVDFSQLTFDPGQKELVVGARNYLFRLQLEDLSLIQAVEWECDEATKKACYSKGKSKEECQNYIRVLLVGGDRLFTCGTNAFTPVCTNRSLSNLTEIHDQISGMARCPYSPQHNSTALLTAGGELYAATAMDFPGRDPAIYRSLGILPPLRTAQYNSKWLNEPNFVSSYDIGNFTYFFFRENAVEHDCGKTVFSRAARVCKNDIGGRFLLEDTWTTFMKARLNCSRPGEVPFYYNELQSTFFLPELDLIYGIFTTNVNSIAASAVCVFNLSAIAQAFSGPFKYQENSRSAWLPYPNPNPHFQCGTVDQGLYVNLTERNLQDAQKFILMHEVVQPVTTVPSFMEDNSRFSHVAVDVVQGREALVHIIYLATDYGTIKKVRVPLNQTSSSCLLEEIELFPERRREPIRSLQILHSQSVLFVGLREHVVKIPLKRCQFYRTRSTCIGAQDPYCGWDVVMKKCTSLEESLSMTQWEQSISACPTRNLTVDGHFGVWSPWTPCTHTDGSAVGSCLCRTRSCDSPAPQCGGWQCEGPGMEIANCSRNGGWTPWTSWSPCSTTCGIGFQVRQRSCSNPTPRHGGRVCVGQNREERYCNEHLLCPPHMFWTGWGPWERCTAQCGGGIQARRRICENGPDCAGCNVEYQSCNTNPCPELKKTTPWTPWTPVNISDNGGHYEQRFRYTCKARLADPNLLEVGRQRIEMRYCSSDGTSGCSTDGLSGDFLRAGRYSAHTVNGAWSAWTSWSQCSRDCSRGIRNRKRVCNNPEPKYGGMPCLGPSLEYQECNILPCPVDGVWSCWSPWTKCSATCGGGHYMRTRSCSNPAPAYGGDICLGLHTEEALCNTQPCPESWSEWSDWSECEASGVQVRARQCILLFPMGSQCSGNTTESRPCVFDSNFIPEVSVARSSSVEEKRCGEFNMFHMIAVGLSSSILGCLLTLLVYTYCQRYQQQSHDATVIHPVSPAPLNTSITNHINKLDKYDSVEAIKAFNKNNLILEERNKYFNPHLTGKTYSNAYFTDLNNYDEY

SEQ ID NO: 757 - protein, 402 aa, Homo sapiens [sequence omitted]

SEQ ID NO: 758 - protein, 1596 aa, Homo sapiens
MESRETLSSSRQRGGESDFLPVSSAKPPAAPGCAGEPLLSTPGPGKGIPVGGERMEPEEEDELGSGRDVDSNSNADSEKWVAGDGLEEQEFSIKEANFTEGSLKLKIQTTKRAKKPPKNLENYICPPEIKITIKQSGDQKVSRAGKNSKATKEEERSHSKKKLLTASDLAASDLKGFQPQAYERPQKHSTLHYDTGLPQDFTGDTLKPKHQQKSSSQNHMDWSTNSDSGPVTQNCFISPESGRETASTSKIPALEPVASFAKAQGKKGSAGNTWSQLSNNNKDLLLGGVAPSPSSHSSPAPPSSSAECNGLQPLVDQDGGGTKEPPEPPTVGSKKKSSKKDVISQTIPNPDLDWVKNAQKAFDNTEGKREGYSADSAQEASPARQNVSSASNPENDSSHVRITIPIKAPSLDPTNHKRKKRQSIKAVVEKIMPEKALASGITMSSEVVNRILSNSEGNKKDPRVPKLSKMIENESPSVGLETGGNAEKVIPGGVSKPRKPPMVMTPPTCTDHSPSRKLPEIQHPKFAAKRRWTCSKPKPSTMLREAVMATSDKLMLEPPSAYPITPSSPLYTNTDSLTVITPVKKKRGRPKKQPLLTVETIHEGTSTSPVSPISREFPGTKKRKRRRNLAKLAQLVPGEDKPMSEMKFHKKVGKLGVLDKKTIKTINKMKTLKRKNILNQILSCSSSVALKAKAPPETSPGAAAIESKLGKQINVSKRGTIYIGKKRGRKPRAELPPPSEEPKTAIKHPRPVSSQPDVPAVPSNFQSLVASSPAAMHPLSTQLGGSNGNLSPASTETNFSELKTMPNLQPISALPTKTQKGIHSGTWKLSPPRLMANSPSHLCEIGSLKEITLSPVSESHSEETIPSDSGIGTDNNSTSDQAEKSSESRRRYSFDFCSLDNPEAIPSDTSTKNRHGHRQKHLIVDNFLAHESLKKPKHKRKRKSLQNRDDLQFLADLEELITKFQVFRISHRSYTFYHENPYPSIFRINFDHYYPVPYIQYDPLLYLRRTSDLKSKKKRGRPAKTNDTMTKVPFLQGFSYPIPSGSYYAPYGMPYTSMPMMNLGYYGQYPAPLYLSHTLGAASPFMRPTVPPPQFHTNSHVKMSGAAKHKAKHGVHLQGPVSMGLGDMQPSLNPPKVGSASLSSGRLHKRKHKHKHKHKEDRILGTHDNLSGLFAGKATGFSSHILSERLSSADKELPLVSEKNKHKEKQKHQHSEAGHKASKNNFEVDTLSTLSLSDAQHWTQAKEKGDLSSEPVDSCTKRYSGSGGDGGSTRSENLDVFSEMNPSNDKWDSDVSGSKRRSYEGFGTYREKDIQAFKMNRKERSSYDSSMSPGMPSPHLKVDQTAVHSKNEGSVPTMMTRKKPAAVDSVTIPPAPVLSLLAASAATSDAVGSSLKKRFKRREIEAIQCEVRKMCNYTKILSTKKNLDHVNKILKAKRLQRQSKTGNNFVKKRRGRPRKQPTQFDEDSRDQMPVLEKCIDLPSKRGQKPSLSPLVLEPAASQDTIMATIEAVIHMAREAPPLPPPPPPPLPPPPPPPLPPPPPLPKTPRGGKRKHKPQAPAQPPQQSPPQQPLPQEEEVKAKRQRKSRGSESEVLP

SEQ ID NO: 759 - protein, 2564 aa, Homo sapiens
MKQLQPQPPPKMGDFYDPEHPTPEEEENEAKIENVQKTGFIKGPMFKGVASSRFLPKGTKTKVNLEEQGRQKVSFSFSLTKKTLQNRFLTALGNEKQSDTPNPPAVPLQVDSTPKMKMEIGDTLSTAEESSPPKSRVELGKIHFKKHLLHVTSRPLLATTTAVASPPTHAAPLPAVIAESTTVDSPPSSPPPPPPPAQATTLSSPAPVTEPVALPHTPITVLMAAPVPLPVDVAVRSLKEPPIIIVPESLEADTKQDTISNSLEEHVTQILNEQADISSKKEDSHIGKDEEIPDSSKISLSCKKTGSKKKSSQSEGIFLGSESDEDSVRTSSSQRSHDLKFSASIEKERDFKKSSAPLKSEDLGKPSRSKTDRDDKYFSYSKLERDTRYVSSRCRSERERRRSRSHSRSERGSRTNLSYSRSERSHYYDSDRRYHRSSPYRERTRYSRPYTDNRARESSDSEEEYKKTYSRRTSSHSSSYRDLRTSSYSKSDRDCKTETSYLEMERRGKYSSKLERESKRTSENEAIKRCCSPPNELGFRRGSSYSKHDSSASRYKSTLSKPIPKSDKFKNSFCCTELNEEIKQSHSFSLQTPCSKGSELRMINKNPEREKAGSPAPSNRLNDSPTLKKLDELPIFKSEFITHDSHDSIKELDSLSKVKNDQLRSFCPIELNINGSPGAESDLATFCTSKTDAVLMTSDDSVTGSELSPLVKACMLSSNGFQNISRCKEKDLDDTCMLHKKSESPFRETEPLVSPHQDKLMSMPVMTVDYSKTVVKEPVDTRVSCCKTKDSDIYCTLNDSNPSLCNSEAENIEPSVMKISSNSFMNVHLESKPVICDSRNLTDHSKFACEEYKQSIGSTSSASVNHFDDLYQPIGSSGIASSLQSLPPGIKVDSLTLLKCGENTSPVLDAVLKSKKSSEFLKHAGKETIVEVGSDLPDSGKGFASRENRRNNGLSGKCLQEAQEEGNSILPERRGRPEISLDERGEGGHVHTSDDSEVVFSSCDLNLTMEDSDGVTYALKCDSSGHAPEIVSTVHEDYSGSSESSNDESDSEDTDSDDSSIPRNRLQSVVVVPKNSTLPMEETSPCSSRSSQSYRHYSDHWEDERLESRRHLYEEKFESIASKACPQTDKFFLHKGTEKNPEISFTQSSRKQIDNRLPELSHPQSDGVDSTSHTDVKSDPLGHPNSEETVKAKIPSRQQEELPIYSSDFEDVPNKSWQQTTFQNRPDSRLGKTELSFSSSCEIPHVDGLHSSEELRNLGWDFSQEKPSTTYQQPDSSYGACGGHKYQQNAEQYGGTRDYWQGNGYWDPRSGRPPGTGVVYDRTQGQVPDSLTDDREEEENWDQQDGSHFSDQSDKFLLSLQKDKGSVQAPEISSNSIKDTLAVNEKKDFSKNLEKNDIKDRGPLKKRRQEIESDSESDGELQDRKKVRVEVEQGETSVPPGSALVGPSCVMDDFRDPQRWKECAKQGKMPCYFDLIEENVYLTERKKNKSHRDIKRMQCECTPLSKDERAQGEIACGEDCLNRLLMIECSSRCPNGDYCSNRRFQRKQHADVEVILTEKKGWGLRAAKDLPSNTFVLEYCGEVLDHKEFKARVKEYARNKNIHYYFMALKNDEIIDATQKGNCSRFMNHSCEPNCETQKWTVNGQLRVGFFTTKLVPSGSELTFDYQFQRYGKEAQKCFCGSANCRGYLGGENRVSIRAAGGKMKKERSRKKDSVDGELEALMENGEGLSDKNQVLSLSRLMVRIETLEQKLTCLELIQNTHSQSCLKSFLERHGLSLLWIWMAELGDGRESNQKLQEEIIKTLEHLPIPTKNMLEESKVLPIIQRWSQTKTAVPPLSEGDGYSSENTSRAHTPLNTPDPSTKLSTEADTDTPKKLMFRRLKIISENSMDSAISDATSELEGKDGKEDLDQLENVPVEEEEELQSQQLLPQQLPECKVDSETNIEASKLPTSEPEADAEIEPKESNGTKLEEPINEETPSQDEEEGVSDVESERSQEQPDKTVDISDLATKLLDSWKDLKEVYRIPKKSQTEKENTTTERGRDAVGFRDQTPAPKTPNRSRERDPDKQTQNKEKRKRRSSLSPPSSAYERGTKRPDDRYDTPTSKKKVRIKDRNKLSTEERRKLFEQEVAQREAQKQQQQMQNLGMTSPLPYDSLGYNAPHHPFAGYPPGYPMQAYVDPSNPNAGKVLLPTPSMDPVCSPAPYDHAQPLVGHSTEPLSAPPPVPVVPHVAAPVEVSSSQYVAQSDGVVHQDSSVAVLPVPAPGPVQGQNYSVWDSNQQSVSVQQQYSPAQSQATIYYQGQTCPTVYGVTSPYSQTTPPIVQSYAQPSLQYIQGQQIFTAHPQGVVVQPAAAVTTIVAPGQPQPLQPSEMVVTNNLLDLPPPSPPKPKTIVLPPNWKTARDPEGKIYYYHVITRQTQWDPPTWESPGDDASLEHEAEMDLGTPTYDENPMKASKKPKTAEADTSSELAKKSKEVFRKEMSQFIVQCLNPYRKPDCKVGRITTTEDFKHLARKLTHGVMNKELKYCKNPEDLECNENVKHKTKEYIKKYMQKFGAVYKPKEDTELE

SEQ ID NO: 760 - protein, 1442 aa, Homo sapiens
MSIAIPLGVTTSDTSYSDMAAGSDPESVEASPAVNEKSVYSTHNYGTTQRHGCRGLPYATIIPRSDLNGLPSPVEERCGDSPNSEGETVPTWCPCGLSQDGFLLNCDKCRGMSRGKVIRLHRRKQDNISGGDSSATESWDEELSPSTVLYTATQHTPTSITLTVRRTKPKKRKKSPEKGRAAPKTKKIKNSPSEAQNLDENTTEGWENRIRLWTDQYEEAFTNQYSADVQNALEQHLHSSKEFVGKPTILDTINKTELACNNTVIGSQMQLQLGRVTRVQKHRKILRAARDLALDTLIIEYRGKVMLRQQFEVNGHFFKKPYPFVLFYSKFNGVEMCVDARTFGNDARFIRRSCTPNAEVRHMIADGMIHLCIYAVSAITKDAEVTIAFDYEYSNCNYKVDCACHKGNRNCPIQKRNPNATELPLLPPPPSLPTIGAETRRRKARRKELEMEQQNEASEENNDQQSQEVPEKVTVSSDHEEVDNPEEKPEEEKEEVIDDQENLAHSRRTREDRKVEAIMHAFENLEKRKKRRDQPLEQSNSDVEITTTTSETPVGEETKTEAPESEVSNSVSNVTIPSTPQSVGVNTRRSSQAGDIAAEKLVPKPPPAKPSRPRPKSRISRYRTSSAQRLKRQKQANAQQAELSQAALEEGGSNSLVTPTEAGSLDSSGENRPLTGSDPTVVSITGSHVNRAASKYPKTKKYLVTEWLNDKAEKQECPVECPLRITTDPTVLATTLNMLPGLIHSPLICTTPKHYIRFGSPFIPERRRRPLLPDGTFSSCKKRWIKQALEEGMTQTSSVPQETRTQHLYQSNENSSSSSICKDNADLLSPLKKWKSRYLMEQNVTKLLRPLSPVTPPPPNSGSKSPQLATPGSSHPGEEECRNGYSLMFSPVTSLTTASRCNTPLQFELCHRKDLDLAKVGYLDSNTNSCADRPSLLNSGHSDLAPHPSLGPTSETGFPSRSGDGHQTLVRNSDQAFRTEFNLMYAYSPLNAMPRADGLYRGSPLVGDRKPLHLDGGYCSPAEGFSSRYEHGLMKDLSRGSLSPGGERACEGVPSAPQNPPQRKKVSLLEYRKRKQEAKENSAGGGGDSAQSKSKSAGAGQGSSNSVSDTGAHGVQGSSARTPSSPHKKFSPSHSSMSHLEAVSPSDSRGTSSSHCRPQENISSRWMVPTSVERLREGGSIPKVLRSSVRVAQKGEPSPTWESNITEKDSDPADGEGPETLSSALSKGATVYSPSRYSYQLLQCDSPRTESQSLLQQSSSPFRGHPTQSPGYSYRTTALRPGNPPSHGSSESSLSSTSYSSPAHPVSTDSLAPFTGTPGYFSSQPHSGNSTGSNLPRRSCPSSAASPTLQGPSDSPTSDSVSQSSTGTLSSTSFPQNSRSSLPSDLRTISLPSAGQSAVYQASRVSAVSNSQHYPHRGSGGVHQYRLQPLQGSGVKTQTGLS

SEQ ID NO: 761 - protein, 1291 aa, Homo sapiens
MSSLPGCIGLDAATATVESEEIAELQQAVVEELGISMEELRHFIDEELEKMDCVQQRKKQLAELETWVIQKESEVAHVDQLFDDASRAVTNCESLVKDFYSKLGLQYRDSSSEDESSRPTEIIEIPDEDDDVLSIDSGDAGSRTPKDQKLREAMAALRKSAQDVQKFMDAVNKKSSSQDLHKGTLSQMSGELSKDGDLIVSMRILGKKRTKTWHKGTLIAIQTVGPGKKYKVKFDNKGKSLLSGNHIAYDYHPPADKLYVGSRVVAKYKDGNQVWLYAGIVAETPNVKNKLRFLIFFDDGYASYVTQSELYPICRPLKKTWEDIEDISCRDFIEEYVTAYPNRPMVLLKSGQLIKTEWEGTWWKSRVEEVDGSLVRILFLDDKRCEWIYRGSTRLEPMFSMKTSSASALEKKQGQLRTRPNMGAVRSKGPVVQYTQDLTGTGTQFKPVEPPQPTAPPAPPFPPAPPLSPQAGDSDLESQLAQSRKQVAKKSTSFRPGSVGSGHSSPTSPALSENVSGGKPGINQTYRSPLGSTASAPAPSALPAPPAPPVFHGMLERAPAEPSYRAPMEKLFYLPHVCSYTCLSRVRPMRNEQYRGKNPLLVPLLYDFRRMTARRRVNRKMGFHVIYKTPCGLCLRTMQEIERYLFETGCDFLFLEMFCLDPYVLVDRKFQPYKPFYYILDITYGKEDVPLSCVNEIDTTPPPQVAYSKERIPGKGVFINTGPEFLVGCDCKDGCRDKSKCACHQLTIQATACTPGGQINPNSGYQYKRLEECLPTGVYECNKRCKCDPNMCTNRLVQHGLQVRLQLFKTQNKGWGIRCLDDIAKGSFVCIYAGKILTDDFADKEGLEMGDEYFANLDHIESVENFKEGYESDAPCSSDSSGVDLKDQEDGNSGTEDPEESNDDSSDDNFCKDEDFSTSSVWRSYATRRQTRGQKENGLSETTSKDSHPPDLGPPHIPVPPSIPVGGCNPPSSEETPKNKVASWLSCNSVSEGGFADSDSHSSFKTNEGGEGRAGGSRMEAEKASTSGLGIKDEGDIKQAKKEDTDDRNKMSVVTESSRNYGYNPSPVKPEGLRRPPSKTSMHQSRRLMASAQSNPDDVLTLSSSTESEGESGTSRKPTAGQTSATAVDSDDIQTISSGSEGDDFEDKKNMTGPMKRQVAVKSTRGFALKSTHGIAIKSTNMASVDKGESAPVRKNTRQFYDGEESCYIIDAKLEGNLGRYLNHSCSPNLFVQNVFVDTHDLRFPWVAFFASKRIRAGTELTWDYNYEVGSVEGKELLCCCGAIECRGRLL

SEQ ID NO: 762 - protein, 719 aa, Homo sapiens
MGEKNGDAKTFWMELEDDGKVDFIFEQVQNVLQSLKQKIKDGSATNKEYIQAMILVNEATIINSSTSIKGASQKEVNAQSSDPMPVTQKEQENKSNAFPSTSCENSFPEDCTFLTTENKEILSLEDKVVDFREKDSSSNLSYQSHDCSGACLMKMPLNLKGENPLQLPIKCHFQRRHAKTNSHSSALHVSYKTPCGRSLRNVEEVFRYLLETECNFLFTDNFSFNTYVQLARNYPKQKEVVSDVDISNGVESVPISFCNEIDSRKLPQFKYRKTVWPRAYNLTNFSSMFTDSCDCSEGCIDITKCACLQLTARNAKTSPLSSDKITTGYKYKRLQRQIPTGIYECSLLCKCNRQLCQNRVVQHGPQVRLQVFKTEQKGWGVRCLDDIDRGTFVCIYSGRLLSRANTEKSYGIDENGRDENTMKNIFSKKRKLEVACSDCEVEVLPLGLETHPRTAKTEKCPPKFSNNPKELTVETKYDNISRIQYHSVIRDPESKTAIFQHNGKKMEFVSSESVTPEDNDGFKPPREHLNSKTKGAQKDSSSNHVDEFEDNLLIESDVIDITKYREETPPRSRCNQATTLDNQNIKKAIEVQIQKPQEGRSTACQRQQVFCDEELLSETKNTSSDSLTKFNKGNVFLLDATKEGNVGRFLNHSCCPNLLVQNVFVETHNRNFPLVAFFTNRYVKARTELTWDYGYEAGTVPEKEIFCQCGVNKCRKKIL

SEQ ID NO: 763 - protein, 923 aa, Homo sapiens
MGTPRAQHPPPPQLLFLILLSCPWIQGLPLKEEEILPEPGSETPTVASEALAELLHGALLRRGPEMGYLPGSDRDPTLATPPAGQTLAVPSLPRATEPGTGPLTTAVTPNGVRGAGPTAPELLTPPPGTTAPPPPSPASPGPPLGPEGGEEETTTTIITTTTVTTTVTSPVLCNNNISEGEGYVESPDLGSPVSRTLGLLDCTYSIHVYPGYGIEIQVQTLNLSQEEELLVLAGGGSPGLAPRLLANSSMLGEGQVLRSPTNRLLLHFQSPRVPRGGGFRIHYQAYLLSCGFPPRPAHGDVSVTDLHPGGTATFHCDSGYQLQGEETLICLNGTRPSWNGETPSCMASCGGTIHNATLGRIVSPEPGGAVGPNLTCRWVIEAAEGRRLHLHFERVSLDEDNDRLMVRSGGSPLSPVIYDSDMDDVPERGLISDAQSLYVELLSETPANPLLLSLRFEAFEEDRCFAPFLAHGNVTTTDPEYRPGALATFSCLPGYALEPPGPPNAIECVDPTEPHWNDTEPACKAMCGGELSEPAGVVLSPDWPQSYSPGQDCVWGVHVQEEKRILLQVEILNVREGDMLTLFDGDGPSARVLAQLRGPQPRRRLLSSGPDLTLQFQAPPGPPNPGLGQGFVLHFKEVPRNDTCPELPPPEWGWRTASHGDLIRGTVLTYQCEPGYELLGSDILTCQWDLSWSAAPPACQKIMTCADPGEIANGHRTASDAGFPVGSHVQYRCLPGYSLEGAAMLTCYSRDTGTPKWSDRVPKCALKYEPCLNPGVPENGYQTLYKHHYQAGESLRFFCYEGFELIGEVTITCVPGHPSQWTSQPPLCKVAYEELLDNRKLEVTQTTDPSRQLEGGNLALAILLPLGLVIVLGSGVYIYYTKLQGKSLFGFSGSHSYSPITVESDFSNPLYEAGDTREYEVSI

SEQ ID NO: 764 - protein, 502 aa, Homo sapiens
MSCPVPACCALLLVLGLCRARPRNALLLLADDGGFESGAYNNSAIATPHLDALARRSLLFRNAFTSVSSCSPSRASLLTGLPQHQNGMYGLHQDVHHFNSFDKVRSLPLLLSQAGVRTGIIGKKHVGPETVYPFDFAYTEENGSVLQVGRNITRIKLLVRKFLQTQDDRPFFLYVAFHDPHRCGHSQPQYGTFCEKFGNGESGMGRIPDWTPQAYDPLDVLVPYFVPNTPAARADLAAQYTTVGRMDQGVGLVLQELRDAGVLNDTLVIFTSDNGIPFPSGRTNLYWPGTAEPLLVSSPEHPKRWGQVSEAYVSLLDLTPTILDWFSIPYPSYAIFGSKTIHLTGRSLLPALEAEPLWATVFGSQSHHEVTMSYPMRSVQHRHFRLVHNLNFKMPFPIDQDFYVSPTFQDLLNRTTAGQPTGWYKDLRHYYYRARWELYDRSRDPHETQNLATDPRFAQLLEMLRDQLAKWQWETHDPWVCAPDGVLEEKLSPQCQPLHNEL

SEQ ID NO: 765 - protein, 749 aa, Homo sapiens
MSGSHTPACGPFSALTPSIWPQEILAKYTQKEESAEQPEFYYDEFGFRVYKEEGDEPGSSLLANSPLMEDAPQRLRWQAHLEFTHNHDVGDLTWDKIAVSLPRSEKLRSLVLAGIPHGMRPQLWMRLSGALQKKRNSELSYREIVKNSSNDETIAAKQIEKDLLRTMPSNACFASMGSIGVPRLRRVLRALAWLYPEIGYCQGTGMVAACLLLFLEEEDAFWMMSAIIEDLLPASYFSTTLLGVQTDQRVLRHLIVQYLPRLDKLLQEHDIELSLITLHWFLTAFASVVDIKLLLRIWDLFFYEGSRVLFQLTLGMLHLKEEELIQSENSASIFNTLSDIPSQMEDAELLLGVAMRLAGSLTDVAVETQRRKHLAYLIADQGQLLGAGTLTNLSQVVRRRTQRRKSTITALLFGEDDLEALKAKNIKQTELVADLREAILRVARHFQCTDPKNCSVELTPDYSMESHQRDHENYVACSRSHRRRAKALLDFERHDDDELGFRKNDIITIVSQKDEHCWVGELNGLRGWFPAKFVEVLDERSKEYSIAGDDSVTEGVTDLVRGTLCPALKALFEHGLKKPSLLGGACHPWLFIEEAAGREVERDFASVYSRLVLCKTFRLDEDGKVLTPEELLYRAVQSVNVTHDAVHAQMDVKLRSLICVGLNEQVLHLWLEVLCSSLPTVEKWYQPWSFLRSPGWVQIKCELRVLCCFAFSLSQDWELPAKREAQQPLKEGVRDMLVKHHLFSWDVDG

SEQ ID NO: 766 - protein, 665 aa, Homo sapiens
MVEAIVEFDYQAQHDDELTISVGEIITNIRKEDGGWWEGQINGRRGLFPDNFVREIKKEMKKDPLTNKAPEKPLHEVPSGNSLLSSETILRTNKRGERRRRRCQVAFSYLPQNDDELELKVGDIIEVVGEVEEGWWEGVLNGKTGMFPSNFIKELSGESDELGISQDEQLSKSSLRETTGSESDGGDSSSTKSEGANGTVATAAIQPKKVKGVGFGDIFKDKPIKLRPRSIEVENDFLPVEKTIGKKLPATTATPDSSKTEMDSRTKSKDYCKVIFPYEAQNDDELTIKEGDIVTLINKDCIDVGWWEGELNGRRGVFPDNFVKLLPPDFEKEGNRPKKPPPPSAPVIKQGAGTTERKHEIKKIPPERPEMLPNRTEEKERPEREPKLDLQKPSVPAIPPKKPRPPKTNSLSRPGALPPRRPERPVGPLTHTRGDSPKIDLAGSSLSGILDKDLSDRSNDIDLEGFDSVVSSTEKLSHPTTSRPKATGRRPPSQSLTSSSLSSPDIFDSPSPEEDKEEHISLAHRGVDASKKTSKTVTISQVSDNKASLPPKPGTMAAGGGGPAPLSSAAPSPLSSSLGTAGHRANSPSLFGTEGKPKMEPAASSQAAVEELRTQVRELRSIIETMKDQQKREIKQLLSELDEEKKIRLRLQMEVNDIKKALQSK

SEQ ID NO: 767 - protein, 2161 aa, Homo sapiens
MTHSPATSEDEERHSASECPEGGSESDSSPDGPGRGPRGTRGQGSGAPGSLASVRGLQGRSMSVPDDAHFSMMVFRIGIPDLHQTKCLRFNPDATIWTAKQQVLCALSESLQDVLNYGLFQPATSGRDANFLEEERLLREYPQSFEKGVPYLEFRYKTRVYKQTNLDEKQLAKLHTKTGLKKFLEYVQLGTSDKVARLLDKGLDPNYHDSDSGETPLTLAAQTEGSVEVIRTLCLGGAHIDFRARDGMTALHKAACARHCLALTALLDLGGSPNYKDRRGLTPLFHTAMVGGDPRCCELLLFNRAQLGIADENGWQEIHQACQRGHSQHLEHLLFYGAEPGAQNASGNTALHICALYNKETCARILLYRGADKDVKNNNGQTPFQVAVIAGNFELGELIRNHREQDVVPFQESPKYAARRRGPPGTGLTVPPALLRANSDTSMALPDWMVFSAPGAASSGAPGPTSGSQGQSQPSAPTTKLSSGTLRSASSPRGARARSPSRGRHPEDAKRQPRGRPSSSGTPREGPAGGTGGSGGPGGSLGSRGRRRKLYSAVPGRSFMAVKSYQAQAEGEISLSKGEKIKVLSIGEGGFWEGQVKGRVGWFPSDCLEEVANRSQESKQESRSDKAKRLFRHYTVGSYDSFDAPSLMDGIGPGSDYIIKEKTVLLQKKDSEGFGFVLRGAKAQTPIEEFTPTPAFPALQYLESVDEGGVAWRAGLRMGDFLIEVNGQNVVKVGHRQVVNMIRQGGNTLMVKVVMVTRHPDMDEAVHKKAPQQAKRLPPPTISLRSKSMTSELEEMEYEQQPAPVPSMEKKRTVYQMALNKLDEILAAAQQTISASESPGPGGLASLGKHRPKGFFATESSFDPHHRAQPSYERPSFLPPGPGLMLRQKSIGAAEDDRPYLAPPAMKFSRSLSVPGSEDIPPPPTTSPPEPPYSTPPVPSSSGRLTPSPRGGPFNPGSGGPLPASSPASFDGPSPPDTRVGSREKSLYHSGPLPPAHHHPPHHHHHHAPPPQPHHHHAHPPHPPEMETGGSPDDPPPRLALGPQPSLRGWRGGGPSPTPGAPSPSHHGSAGGGGGSSQGPALRYFQLPPRAASAAMYVPARSGRGRKGPLVKQTKVEGEPQKGGGLPPAPSPTSPASPQPPPAVAAPSEKNSIPIPTIIIKAPSTSSSGRSSQGSSTEAEPPTQPEPTGGGGGGGSSPSPAPAMSPVPPSPSPVPTPASPSGPATLDFTSQFGAALVGAARREGGWQNEARRRSTLFLSTDAGDEDGGDGGLGTGAAPGPRLRHSKSIDEGMFSAEPYLRLESAGSGAGYGGYGAGSRAYGGGGGSSAFTSFLPPRPLVHPLTGKALDPASPLGLALAARERALKESSEGGGAPQPPPRPPSPRYEAPPPTPHHHSPHAHHEPVLRLWGASPPDPARRELGYRAGLGSQEKSLPASPPAARRSLLHRLPPTAPGVGPLLLQLGTEPPAPHPGVSKPWRSAAPEEPERLPLHVRFLENCQPRAPVTSGRGPPSEDGPGVPPPSPRRSVPPSPTSPRASEENGLPLLVLPPPAPSVDVEDGEFLFVEPLPPPLEFSNSFEKPESPLTPGPPHPLPDTPAPATPLPPVPPPAVAAAPPTLDSTASSLTSYDSEVATLTQGASAAPGDPHPPGPPAPAAPAPAAPQPGPDPPPGTDSGIEEVDSRSSSDHPLETISSASTLSSLSAEGGGSAGGGGGAGAGVASGPELLDTYVAYLDGQAFGGSSTPGPPYPPQLMTPSKLRGRALGASGGLRPGPSGGLRDPVTPTSPTVSVTGAGTDGLLALRACSGPPTAGVAGGPVAVEPEVPPVPLPTASSLPRKLLPWEEGPGPPPPPLPGPLAQPQASALATVKASIISELSSKLQQFGGSSAAGGALPWARGGSGGGGDSHHGGASYVPERTSSLQRQRLSDDSQSSLLSKPVSSLFQNWPKPPLPPLPTGTGVSPTAAAAPGATSPSASSSSTSTRHLQGVEFEMRPPLLRRAPSPSLLPASEHKVSPAPRPSSLPILPSGPLYPGLFDIRGSPTGGAGGSADPFAPVFVPPHPGISGGLGGALSGASRSLSPTRLLSLPPDKPFGAKPLGFWTKFDVADWLEWLGLAEHRAQFLDHEIDGSHLPALTKEDYVDLGVTRVGHRMNIDRALKFFLER

SEQ ID NO: 768 - protein, 1849 aa, Homo sapiens
MPRSPTSSEDEMAQSFSDYSVGSESDSSKEETIYDTIRATAEKPGGARTEESQGNTLVIRVVIHDLQQTKCIRFNPDATVWVAKQRILCTLTQSLKDVLNYGLFQPASNGRDGKFLDEERLLREYPQPVGEGVPSLEFRYKKRVYKQASLDEKQLAKLHTKTNLKKCMDHIQHRLVEKITKMLDRGLDPNFHDPETGETPLTLAAQLDDSVEVIKALKNGGAHLDFRAKDGMTALHKAARARNQVALKTLLELGASPDYKDSYGLTPLYHTAIVGGDPYCCELLLHEHATVCCKDENGWHEIHQACRYGHVQHLEHLLFYGADMSAQNASGNTALHICALYNQDSCARVLLFRGGNKELKNYNSQTPFQVAIIAGNFELAEYIKNHKETDIVPFREAPAYSNRRRRPPNTLAAPRVLLRSNSDNNLNASAPDWAVCSTATSHRSLSPQLLQQMPSKPEGAAKTIGSYVPGPRSRSPSLNRLGGAGEDGKRPQPLWHVGSPFALGANKDSLSAFEYPGPKRKLYSAVPGRLFVAVKPYQPQVDGEIPLHRGDRVKVLSIGEGGFWEGSARGHIGWFPAECVEEVQCKPRDSQAETRADRSKKLFRHYTVGSYDSFDTSSDCIIEEKTVVLQKKDNEGFGFVLRGAKADTPIEEFTPTPAFPALQYLESVDEGGVAWQAGLRTGDFLIEVNNENVVKVGHRQVVNMIRQGGNHLVLKVVTVTRNLDPDDTARKKAPPPPKRAPTTALTLRSKSMTSELEELVDKASVRKKKDKPEEIVPASKPSRAAENMAVEPRVATIKQRPSSRCFPAGSDMNSVYERQGIAVMTPTVPGSPKAPFLGIPRGTMRRQKSIDSRIFLSGITEEERQFLAPPMLKFTRSLSMPDTSEDIPPPPQSVPPSPPPPSPTTYNCPKSPTPRVYGTIKPAFNQNSAAKVSPATRSDTVATMMREKGMYFRRELDRYSLDSEDLYSRNAGPQANFRNKRGQMPENPYSEVGKIASKAVYVPAKPARRKGMLVKQSNVEDSPEKTCSIPIPTIIVKEPSTSSSGKSSQGSSMEIDPQAPEPPSQLRPDESLTVSSPFAAAIAGAVRDREKRLEARRNSPAFLSTDLGDEDVGLGPPAPRTRPSMFPEEGDFADEDSAEQLSSPMPSATPREPENHFVGGAEASAPGEAGRPLNSTSKAQGPESSPAVPSASSGTAGPGNYVHPLTGRLLDPSSPLALALSARDRAMKESQQGPKGEAPKADLNKPLYIDTKMRPSLDAGFPTVTRQNTRGPLRRQETENKYETDLGRDRKGDDKKNMLIDIMDTSQQKSAGLLMVHTVDATKLDNALQEEDEKAEVEMKPDSSPSEVPEGVSETEGALQISAAPEPTTVPGRTIVAVGSMEEAVILPFRIPPPPLASVDLDEDFIFTEPLPPPLEFANSFDIPDDRAASVPALSDLVKQKKSDTPQSPSLNSSQPTNSADSKKPASLSNCLPASFLPPPESFDAVADSGIEEVDSRSSSDHHLETTSTISTVSSISTLSSEGGENVDTCTVYADGQAFMVDKPPVPPKPKMKPIIHKSNALYQDALVEEDVDSFVIPPPAPPPPPGSAQPGMAKVLQPRTSKLWGDVTEIKSPILSGPKANVISELNSILQQMNREKLAKPGEGLDSPMGAKSASLAPRSPEIMSTISGTRSTTVTFTVRPGTSQPITLQSRPPDYESRTSGTRRAPSPVVSPTEMNKETLPAPLSAATASPSPALSDVFSLPSQPPSGDLFGLNPAGRSRSPSPSILQQPISNKPFTTKPVHLWTKPDVADWLESLNLGEHKEAFMDNEIDGSHLPNLQKEDLIDLGVTRVGHRMNIERALKQLLDR

SEQ ID NO: 769 - protein, 1731 aa, Homo sapiens
MDGPGASAVVVRVGIPDLQQTKCLRLDPAAPVWAAKQRVLCALNHSLQDALNYGLFQPPSRGRAGKFLDEERLLQEYPPNLDTPLPYLEFRYKRRVYAQNLIDDKQFAKLHTKANLKKFMDYVQLHSTDKVARLLDKGLDPNFHDPDSGECPLSLAAQLDNATDLLKVLKNGGAHLDFRTRDGLTAVHCATRQRNAAALTTLLDLGASPDYKDSRGLTPLYHSALGGGDALCCELLLHDHAQLGITDENGWQEIHQACRFGHVQHLEHLLFYGADMGAQNASGNTALHICALYNQESCARVLLFRGANRDVRNYNSQTAFQVAIIAGNFELAEVIKTHKDSDVVPFRETPSYAKRRRLAGPSGLASPRPLQRSASDINLKGEAQPAASPGPSLRSLPHQLLLQRLQEEKDRDRDADQESNISGPLAGRAGQSKISPSGPGGPGPAPGPGPAPPAPPAPPPRGPKRKLYSAVPGRKFIAVKAHSPQGEGEIPLHRGEAVKVLSIGEGGFWEGTVKGRTGWFPADCVEEVQMRQHDTRPETREDRTKRLFRHYTVGSYDSLTSHSDYVIDDKVAVLQKRDHEGFGFVLRGAKAETPIEEFTPTPAFPALQYLESVDVEGVAWRAGLRTGDFLIEVNGVNVVKVGHKQVVALIRQGGNRLVMKVVSVTRKPEEDGARRRAPPPPKRAPSTTLTLRSKSMTAELEELASIRRRKGEKLDEMLAAAAEPTLRPDIADADSRAATVKQRPTSRRITPAEISSLFERQGLPGPEKLPGSLRKGIPRTKSVGEDEKLASLLEGRFPRSTSMQDPVREGRGIPPPPQTAPPPPPAPYYFDSGPPPAFSPPPPPGRAYDTVRSSFKPGLEARLGAGAAGLYEPGAALGPLPYPERQKRARSMIILQDSAPESGDAPRPPPAATPPERPKRRPRPPGPDSPYANLGAFSASLFAPSKPQRRKSPLVKQLQVEDAQERAALAVGSPGPGGGSFAREPSPTHRGPRPGGLDYGAGDGPGLAFGGPGPAKDRRLEERRRSTVFLSVGAIEGSAPGADLPSLQPSRSIDERLLGTGPTAGRDLLLPSPVSALKPLVSGPSLGPSGSTFIHPLTGKPLDPSSPLALALAARERALASQAPSRSPTPVHSPDADRPGPLFVDVQARDPERGSLASPAFSPRSPAWIPVPARREAEKVPREERKSPEDKKSMILSVLDTSLQRPAGLIVVHATSNGQEPSRLGGAEEERPGTPELAPAPMQSAAVAEPLPSPRAQPPGGTPADAGPGQGSSEEEPELVFAVNLPPAQLSSSDEETREELARIGLVPPPEEFANGVLLATPLAGPGPSPTTVPSPASGKPSSEPPPAPESAADSGVEEADTRSSSDPHLETTSTISTVSSMSTLSSESGELTDTHTSFADGHTFLLEKPPVPPKPKLKSPLGKGPVTFRDPLLKQSSDSELMAQQHHAASAGLASAAGPARPRYLFQRRSKLWGDPVESRGLPGPEDDKPTVISELSSRLQQLNKDTRSLGEEPVGGLGSLLDPAKKSPIAAARLFSSLGELSSISAQRSPGGPGGGASYSVRPSGRYPVARRAPSPVKPASLERVEGLGAGAGGAGRPFGLTPPTILKSSSLSIPHEPKEVRFVVRSVSARSRSPSPSPLPSPASGPGPGAPGPRRPFQQKPLQLWSKFDVGDWLESIHLGEHRDRFEDHEIEGAHLPALTKDDFVELGVTRVGHRMNIERALRQLDGS

SEQ ID NO: 770 - skipped

SEQ ID NO: 771 - protein, 292 aa, Homo sapiens
MEELTAFVSKSFDQKSKDGNGGGGGGGGKKDSITYREVLESGLARSRELGTSDSSLQDITEGGGHCPVHLFKDHVDNDKEKLKEFGTARVAEGIYECKEKREDVKSEDEDGQTKLKQRRSRTNFTLEQLNELERLFDETHYPDAFMREELSQRLGLSEARVQVWFQNRRAKCRKQENQMHKGVILGTANHLDACRVAPYVNMGALRMPFQQVQAQLQLEGVAHAHPHLHPHLAAHAPYLMFPPPPFGLPIASLAESASAAAVVAAAAKSNSKNSSIADLRLKARKHAEALGL

SEQ ID NO: 772 - protein, 783 aa, Homo sapiens
MVIMSEFSADPAGQGQGQQKPLRVGFYDIERTLGKGNFAVVKLARHRVTKTQVAIKIIDKTRLDSSNLEKIYREVQLMKLLNHPHIIKLYQVMETKDMLYIVTEFAKNGEMFDYLTSNGHLSENEARKKFWQILSAVEYCHDHHIVHRDLKTENLLLDGNMDIKLADFGFGNFYKSGEPLSTWCGSPPYAAPEVFEGKEYEGPQLDIWSLGVVLYVLVCGSLPFDGPNLPTLRQRVLEGRFRIPFFMSQDCESLIRRMLVVDPARRITIAQIRQHRWMRAEPCLPGPACPAFSAHSYTSNLGDYDEQALGIMQTLGVDRQRTVESLQNSSYNHFAAIYYLLLERLKEYRNAQCARPGPARQPRPRSSDLSGLEVPQEGLSTDPFRPALLCPQPQTLVQSVLQAEMDCELQSSLQWPLFFPVDASCSGVFRPRPVSPSSLLDTAISEEARQGPGLEEEQDTQESLPSSTGRRHTLAEVSTRLSPLTAPCIVVSPSTTASPAEGTSSDSCLTFSASKSPAGLSGTPATQGLLGACSPVRLASPFLGSQSATPVLQAQGGLGGAVLLPVSFQEGRRASDTSLTQGLKAFRQQLRKTTRTKGFLGLNKIKGLARQVCQAPASRASRGGLSPFHAPAQSPGLHGGAAGSREGWSLLEEVLEQQRLLQLQHHPAAAPGCSQAPQPAPAPFVIAPCDGPGAAPLPSTLLTSGLPLLPPPLLQTGASPVASAAQLLDTHLHIGTGPTALPAVPPPRLARLAPGCEPLGLLQGDCEMEDLMPCSLGTFVLVQ

SEQ ID NO: 773 - protein, 1273 aa, Homo sapiens
MKRRLDDQESPVYAAQQRRIPGSTEAFPHQHRVLAPAPPVYEAVSETMQSATGIQYSVTPSYQVSAMPQSSGSHGPAIAAVHSSHHHPTAVQPHGGQVVQSHAHPAPPVAPVQGQQQFQRLKVEDALSYLDQVKLQFGSQPQVYNDFLDIMKEFKSQSIDTPGVISRVSQLFKGHPDLIMGFNTFLPPGYKIEVQTNDMVNVTTPGQVHQIPTHGIQPQPQPPPQHPSQPSAQSAPAPAQPAPQPPPAKVSKPSQLQAHTPASQQTPPLPPYASPRSPPVQPHTPVTISLGTAPSLQNNQPVEFNHAINYVNKIKNRFQGQPDIYKAFLEILHTYQKEQRNAKEAGGNYTPALTEQEVYAQVARLFKNQEDLLSEFGQFLPDANSSVLLSKTTAEKVDSVRNDHGGTVKKPQLNNKPQRPSQNGCQIRRHPTGTTPPVKKKPKLLNLKDSSMADASKHGGGTESLFFDKVRKALRSAEAYENFLRCLVIFNQEVISRAELVQLVSPFLGKFPELFNWFKNFLGYKESVHLETYPKERATEGIAMEIDYASCKRLGSSYRALPKSYQQPKCTGRTPLCKEVLNDTWVSFPSWSEDSTFVSSKKTQYEEHIYRCEDERFELDVVLETNLATIRVLEAIQKKLSRLSAEEQAKFRLDNTLGGTSEVIHRKALQRIYADKAADIIDGLRKNPSIAVPIVLKRLKMKEEEWREAQRGFNKVWREQNEKYYLKSLDHQGINFKQNDTKVLRSKSLLNEIESIYDERQEQATEENAGVPVGPHLSLAYEDKQILEDAAALIIHHVKRQTGIQKEDKYKIKQIMHHFIPDLLFAQRGDLSDVEEEEEEEMDVDEATGAVKKHNGVGGSPPKSKLLFSNTAAQKLRGMDEVYNLFYVNNNWYIFMRLHQILCLRLLRICSQAERQIEEENREREWEREVLGIKRDKSDSPAIQLRLKEPMDVDVEDYYPAFLDMVRSLLDGNIDSSQYEDSLREMFTIHAYIAFTMDKLIQSIVRQLQHIVSDEICVQVTDLYLAENNNGATGGQLNTQNSRSLLESTYQRKAEQLMSDENCFKLMFIQSQGQVQLTIELLDTEEENSDDPVEAERWSDYVERYMNSDTTSPELREHLAQKPVFLPRNLRRIRKCQRGREQQEKEGKEGNSKKTMENVDSLDKLECRFKLNSYKMVYVIKSEDYMYRRTALLRAHQSHERVSKRLHQRFQAWVDKWTKEHVPREMAAETSKWLMGEGLEGLVPCTTTCDTETLHFVSINKYRVKYGTVFKAP

SEQ ID NO: 774 - protein, 1139 aa, Homo sapiens
MSRRFTVTSLPPAGPARSPDPESRRHSVADPRHLPGEDVKGDGNPKESSPFINSTDTEKGKEYDGKNMALFEEEMDTSPMVSSLLSGLANYTNLPQGSREHEEAENNEGGKKKPVQAPRMGTFMGVYLPCLQNIFGVILFLRLTWVVGIAGIMESFCMVFICCSCTMLTAISMSAIATNGVVPAGGSYYMISRSLGPEFGGAVGLCFYLGTTFAGAMYILGTIEILLAYLFPAMAIFKAEDASGEAAAMLNNMRVYGTCVLTCMATVVFVGVKYVNKFALVFLGCVILSILAIYAGVIKSAFDPPNFPICLLGNRTLSRHGFDVCAKLAWEGNETVTTRLWGLFCSSRFLNATCDEYFTRNNVTEIQGIPGAASGLIKENLWSSYLTKGVIVERSGMTSVGLADGTPIDMDHPYVFSDMTSYFTLLVGIYFPSVTGIMAGSNRSGDLRDAQKSIPTGTILAIATTSAVYISSVVLFGACIEGVVLRDKFGEAVNGNLVVGTLAWPSPWVIVIGSFFSTCGAGLQSLTGAPRLLQAISRDGIVPFLQVFGHGKANGEPTWALLLTACICEIGILIASLDEVAPILSMFFLMCYMFVNLACAVQTLLRTPNWRPRFRYYHWTLSFLGMSLCLALMFICSWYYALVAMLIAGLIYKYIEYRGAEKEWGDGIRGLSLSAARYALLRLEEGPPHTKNWRPQLLVLVRVDQDQNVVHPQLLSLTSQLKAGKGLTIVGSVLEGTFLENHPQAQRAEESIRRLMEAEKVKGFCQVVISSNLRDGVSHLIQSGGLGGLQHNTVLVGWPRNWRQKEDHQTWRNFIELVRETTAGHLALLVTKNVSMFPGNPERFSEGSIDVWWIVHDGGMLMLLPFLLRHHKVWRKCKMRIFTVAQMDDNSIQMKKDLTTFLYHLRITAEVEVVEMHESDISAYTYEKTLVMEQRSQILKQMHLTKNEREREIQSITDESRGSIRRKNPANTRLRLNVPEETAGDSEEKPEEEVQLIHDQSAPSCPSSSPSPGEEPEGEGETDPEKVHLTWTKDKSVAEKNKGPSPVSSEGIKDFFSMKPEWENLNQSNVRRMHTAVRLNEVIVKKSRDAKLVLLNMPGPPRNRNGDENYMEFLEVLTEHLDRVMLVRGGGREVITIYS

SEQ ID NO: 775 - protein, 465 aa, Homo sapiens
MGGAVVDEGPTGVKAPDGGWGWAVLFGCFVITGFSYAFPKAVSVFFKELIQEFGIGYSDTAWISSILLAMLYGTGPLCSVCVNRFGCRPVMLVGGLFASLGMVAASFCRSIIQVYLTTGVITGLGLALNFQPSLIMLNRYFSKRRPMANGLAAAGSPVFLCALSPLGQLLQDRYGWRGGFLILGGLLLNCCVCAALMRPLVVTAQPGSGPPRPSRRLLDLSVFRDRGFVLYAVAASVMVLGLFVPPVFVVSYAKDLGVPDTKAAFLLTILGFIDIFARPAAGFVAGLGKVRPYSVYLFSFSMFFNGLADLAGSTAGDYGGLVVFCIFFGISYGMVGALQFEVLMAIVGTHKFSSAIGLVLLMEAVAVLVGPPSGGKLLDATHVYMYVFILAGAEVLTSSLILLLGNFFCIRKKPKEPQPEVAAAEEEKLHKPPADSGVDLREVEHFLKAEPEKNGEVVHTPETSV

SEQ ID NO: 776 - protein, 478 aa, Homo sapiens
MPPMPSAPPVHPPPDGGWGWIVVGAAFISIGFSYAFPKAVTVFFKEIQQIFHTTYSEIAWISSIMLAVMYAGGPVSSVLVNKYGSRPVVIAGGLLCCLGMVLASFSSSVVQLYLTMGFITGLGLAFNLQPALTIIGKYFYRKRPMANGLAMAGSPVFLSSLAPFNQYLFNTFGWKGSFLILGSLLLNACVAGSLMRPLGPNQTTSKSKNKTGKTEDDSSPKKIKTKKSTWEKVNKYLDFSLFKHRGFLIYLSGNVIMFLGFFAPIIFLAPYAKDQGIDEYSAAFLLSVMAFVDMFARPSVGLIANSKYIRPRIQYFFSFAIMFNGVCHLLCPLAQDYTSLVLYAVFFGLGFGSVSSVLFETLMDLVGAPRFSSAVGLVTIVECGPVLLGPPLAGKLVDLTGEYKYMYMSCGAIVVAASVWLLIGNAINYRLLAKERKEENARQKTRESEPLSKSKHSEDVNVKVSNAQSVTSERETNI

SEQ ID NO: 777 - protein, 524 aa, Homo sapiens
MGKPARKGCEWKRFLKNNWVLLSTVAAVVLGITTGVLVREHSNLSTLEKFYFAFPGEILMRMLKLIILPLIISSMITGVAALDSNVSGKIGLRAVVYYFCTTLIAVILGIVLVVSIKPGVTQKVGEIARTGSTPEVSTVDAMLDLIRNMFPENLVQACFQQYKTKREEVKPPSDPEMNMTEESFTAVMTTAISKNKTKEYKIVGMYSDGINVLGLIVFCLVFGLVIGKMGEKGQILVDFFNALSDATMKIVQIIMCYMPLGILFLIAGKIIEVEDWEIFRKLGLYMATVLTGLAIHSIVILPLIYFIVVRKNPFRFAMGMAQALLTALMISSSSATLPVTFRCAEENNQVDKRITRFVLPVGATINMDGTALYEAVAAVFIAQLNDLDLGIGQIITISITATSASIGAAGVPQAGLVTMVIVLSAVGLPAEDVTLIIAVDWLLDRFRTMVNVLGDAFGTGIVEKLSKKELEQMDVSSEVNIVNPFALESTILDNEDSDTKKSYVNGGFAVDKSDTISFTQTSQF

SEQ ID NO: 778 - protein, 574 aa, Homo sapiens
MASTEGANNMPKQVEVRMHDSHLGSEEPKHRHLGLRLCDKLGKNLLLTLTVFGVILGAVCGGLLRLASPIHPDVVMLIAFPGDILMRMLKMLILPLIISSLITGLSGLDAKASGRLGTRAMVYYMSTTIIAAVLGVILVLAIHPGNPKLKKQLGPGKKNDEVSSLDAFLDLIRNLFPENLVQACFQQIQTVTKKVLVAPPPDEEANATSAVVSLLNETVTEVPEETKMVIKKGLEFKDGMNVLGLIGFFIAFGIAMGKMGDQAKLMVDFFNILNEIVMKLVIMIMWYSPLGIACLICGKIIAIKDLEVVARQLGMYMVTVIIGLIIHGGIFLPLIYFVVTRKNPFSFFAGIFQAWITALGTASSAGTLPVTFRCLEENLGIDKRVTRFVLPVGATINMDGTALYEAVAAIFIAQMNGVVLDGGQIVTVSLTATLASVGAASIPSAGLVTMLLILTAVGLPTEDISLLVAVDWLLDRMRTSVNVVGDSFGAGIVYHLSKSELDTIDSQHRVHEDIEMTKTQSIYDDMKNHRESNSNQCVYAAHNSVIVDECKVTLAANGKSADCSVEEEPWKREK

SEQ ID NO: 779 - protein, 547 aa, Homo sapiens
MEVEEAFQAVGEMGIYQMYLCFLLAVLLQLYVATEAILIALVGATPSYHWDLAELLPNQSHGNQSAGEDQAFGDWLLTANGSEIHKHVHFSSSFTSIASEWFLIANRSYKVSAASSFFFSGVFVGVISFGQLSDRFGRKKVYLTGFALDILFAIANGFSPSYEFFAVTRFLVGMMNGGMSLVAFVLLNECVGTAYWALAGSIGGLFFAVGIAQYALLGYFIRSWRTLAILVNLQGTVVFLLSLFIPESPRWLYSQGRLSEAEEALYLIAKRNRKLKCTFSLTHPANRSCRETGSFLDLFRYRVLLGHTLILMFIWFVCSLVYYGLTLSAGDLGGSIYANLALSGLIEIPSYPLCIYLINQKWFGRKRTLSAFLCLGGLACLIVMFLPEKKDTGVFAVVNSHSLSLLGKLTISAAFNIVYIYTSELYPTVIRNVGLGTCSMFSRVGGIIAPFIPSLKYVQWSLPFIVFGATGLTSGLLSLLLPETLNSPLLETFSDLQVYSYRRLGEEALSLQALDPQQCVDKESSLGSESEEEEEFYDADEETQMIK

SEQ ID NO: 780 - protein, 553 aa, Homo sapiens
MAFQDLLGHAGDLWRFQILQTVFLSIFAVATYLHFMLENFTAFIPGHRCWVHILDNDTVSDNDTGALSQDALLRISIPLDSNMRPEKCRRFVHPQWQLLHLNGTFPNTSDADMEPCVDGWVYDRISFSSTIVTEWDLVCDSQSLTSVAKFVFMAGMMVGGILGGHLSDRFGRRFVLRWCYLQVAIVGTCAALAPTFLIYCSLRFLSGIAAMSLITNTIMLIAEWATHRFQAMGITLGMCPSGIAFMTLAGLAFAIRDWHILQLVVSVPYFVIFLTSSWLLESARWLIINNKPEEGLKELRKAAHRSGMKNARDTLTLEILKSTMKKELEAAQKKKPSLCEMLHMPNICKRISLLSFTRFANFMAYFGLNLHVQHLGNNVFLLQTLFGAVILLANCVAPWALKYMNRRASQMLLMFLLAICLLAIIFVPQEMQTLREVLATLGLGASALANTLAFAHGNEVIPTIIRARAMGINATFANIAGALAPLMMILSVYSPPLPWIIYGVFPFISGFAFLLLPETRNKPLFDTIQDEKNERKDPREPKQEDPRVEVTQF

SEQ ID NO: 781 - protein, 661 aa, Homo sapiens
MDLQQSTTITSLEKWCLDESLSGCRRHYSVKKKLKLIRVLGLFMGLVAISTVSFSISAFSETDTQSTGEASVVSGPRVAQGYHQRTLLDLNDKILDYTPQPPLSKEGESENSTDHAQGDYPKDIFSLEERRKGAIILHVIGMIYMFIALAIVCDEFFVPSLTVITEKLGISDDVAGATFMAAGGSAPELFTSLIGVFIAHSNVGIGTIVGSAVFNILFVIGMCALFSREILNLTWWPLFRDVSFYIVDLIMLIIFFLDNVIMWWESLLLLTAYFCYVVFMKFNVQVEKWVKQMINRNKVVKVTAPEAQAKPSAARDKDEPTLPAKPRLQRGGSSASLHNSLMRNSIFQLMIHTLDPLAEELGSYGKLKYYDTMTEEGRFREKASILHKIAKKKCHVDENERQNGAANHVEKIELPNSTSTDVEMTPSSDASEPVQNGNLSHNIEGAEAQTADEEEDQPLSLAWPSETRKQVTFLIVFPIVFPLWITLPDVRKPSSRKFFPITFFGSITWIAVFSYLMVWWAHQVGETIGISEEIMGLTILAAGTSIPDLITSVIVARKGLGDMAVSSSVGSNIFDITVGLPLPWLLYTVIHRFQPVAVSSNGLFCAIVLLFIMLLFVILSIALCKWRMNKILGFIMFGLYFVFLVVSVLLEDRILTCPVSI

SEQ ID NO: 782 - protein, 678 aa, Homo sapiens
MAVKVQTTKRGDPHELRNIFLQYASTEVDGERYMTPEDFVQRYLGLYNDPNSNPKIVQLLAGVADQTKDGLISYQEFLAFESVLCAPDSMFIVAFQLFDKSGNGEVTFENVKEIFGQTIIHHHIPFNWDCEFIRLHFGHNRKKHLNYTEFTQFLQELQLEHARQAFALKDKSKSGMISGLDFSDIMVTIRSHMLTPFVEENLVSAAGGSISHQVSFSYFNAFNSLLNNMELVRKIYSTLAGTRKDVEVTKEEFAQSAIRYGQVTPLEIDILYQLADLYNASGRLTLADIERIAPLAEGALPYNLAELQRQQSPGLGRPIWLQIAESAYRFTLGSVAGAVGATAVYPIDLVKTRMQNQRGSGSVVGELMYKNSFDCFKKVLRYEGFFGLYRGLIPQLIGVAPEKAIKLTVNDFVRDKFTRRDGSVPLPAEVLAGGCAGGSQVIFTNPLEIVKIRLQVAGEITTGPRVSALNVLRDLGIFGLYKGAKACFLRDIPFSAIYFPVYAHCKLLLADENGHVGGLNLLAAGAMAGVPAASLVTPADVIKTRLQVAARAGQTTYSGVIDCFRKILREEGPSAFWKGTAARVFRSSPQFGVTLVTYELLQRWFYIDFGGLKPAGSEPTPKSRIADLPPANPDHIGGYRLATATFAGIENKFGLYLPKFKSPSVAVVQPKAAVAATQ

SEQ ID NO: 783 - protein, 325 aa, Homo sapiens
MGIFPGIILIFLRVKFATAAVIVSGHQKSTTVSHEMSGLNWKPFVYGGLASIVAEFGTFPVDLTKTRLQVQGQSIDARFKEIKYRGMFHALFRICKEEGVLALYSGIAPALLRQASYGTIKIGIYQSLKRLFVERLEDETLLINMICGVVSGVISSTIANPTDVLKIRMQAQGSLFQGSMIGSFIDIYQQEGTRGLWRGVVPTAQRAAIVVGVELPVYDITKKHLILSGMMGDTILTHFVSSFTCGLAGALASNPVDVVRTRMMNQRAIVGHVDLYKGTVDGILKMWKHEGFFALYKGFWPNWLRLGPWNIIFFITYEQLKRLQI

SEQ ID NO: 784 - protein, 477 aa, Homo sapiens
MLRWLRDFVLPTAACQDAEQPTRYETLFQALDRNGDGVVDIGELQEGLRNLGIPLGQDAEEKIFTTGDVNKDGKLDFEEFMKYLKDHEKKMKLAFKSLDKNNDGKIEASEIVQSLQTLGLTISEQQAELILQSIDVDGTMTVDWNEWRDYFLFNPVTDIEEIIRFWKHSTGIDIGDSLTIPDEFTEDEKKSGQWWRQLLAGGIAGAVSRTSTAPLDRLKIMMQVHGSKSDKMNIFGGFRQMVKEGGIRSLWRGNGTNVIKIAPETAVKFWAYEQYKKLLTEEGQKIGTFERFISGSMAGATAQTFIYPMEVMKTRLAVGKTGQYSGIYDCAKKILKHEGLGAFYKGYVPNLLGIIPYAGIDLAVYELLKSYWLDNFAKDSVNPGVMVLLGCGALSSTCGQLASYPLALVRTRMQAQAMLEGSPQLNMVGLFRRIISKEGIPGLYRGITPNFMKVLPAVGISYVVYENMKQTLGVTQK

SEQ ID NO: 785 - skipped

SEQ ID NO: 786 - protein, 323 aa, Homo sapiens
MSVPEEEERLLPLTQRWPRASKFLLSGCAATVAELATFPLDLTKTRLQMQGEAALARLGDGARESAPYRGMVRTALGIIEEEGFLKLWQGVTPAIYRHVVYSGGRMVTYEHLREVVFGKSEDEHYPLWKSVIGGMMAGVIGQFLANPTDLVKVQMQMEGKRKLEGKPLRFRGVHHAFAKILAEGGIRGLWAGWVPNIQRAALVNMGDLTTYDTVKHYLVLNTPLEDNIMTHGLSSLCSGLVASILGTPADVIKSRIMNQPRDKQGRGLLYKSSTDCLIQAVQGEGFMSLYKGFLPSWLRMTPWSMVFWLTYEKIREMSGVSPF

SEQ ID NO: 787 - protein, 643 aa, Homo sapiens
MLLGASLVGVLLFSKLVLKLPWTQVGFSLLFLYLGSGGWRFIRVFIKTIRRDIFGGLVLLKVKAKVRQCLQERRTVPILFASTVRRHPDKTALIFEGTDTHWTFRQLDEYSSSVANFLQARGLASGDVAAIFMENRNEFVGLWLGMAKLGVEAALINTNLRRDALLHCLTTSRARALVFGSEMASAICEVHASLDPSLSLFCSGSWEPGAVPPSTEHLDPLLKDAPKHLPSCPDKGFTDKLFYIYTSGTTGLPKAAIVVHSRYYRMAALVYYGFRMRPNDIVYDCLPLYHSAGNIVGIGQCLLHGMTVVIRKKFSASRFWDDCIKYNCTIVQYIGELCRYLLNQPPREAENQHQVRMALGNGLRQSIWTNFSSRFHIPQVAEFYGATECNCSLGNFDSQVGACGFNSRILSFVYPIRLVRVNEDTMELIRGPDGVCIPCQPGEPGQLVGRIIQKDPLRRFDGYLNQGANNKKIAKDVFKKGDQAYLTGDVLVMDELGYLYFRDRTGDTFRWKGENVSTTEVEGTLSRLLDMADVAVYGVEVPGTEGRAGMAAVASPTGNCDLERFAQVLEKELPLYARPIFLRLLPELHKTGTYKFQKTELRKEGFDPAIVKDPLFYLDAQKGRYVPLDQEAYSRIQAGEEKL

SEQ ID NO: 788 - protein, 530 aa, Homo sapiens
MGSVGSQRLEEPSVAGTPDPGVVMSFTFDSHQLEEAAEAAQGQGLRARGVPAFTDTTLDEPVPDDRYHAIYFAMLLAGVGFLLPYNSFITDVDYLHHKYPGTSIVFDMSLTYILVALAAVLLNNVLVERLTLHTRITAGYLLALGPLLFISICDVWLQLFSRDQAYAINLAAVGTVAFGCTVQQSSFYGYTGMLPKRYTQGVMTGESTAGVMISLSRILTKLLLPDERASTLIFFLVSVALELLCFLLHLLVRRSRFVLFYTTRPRDSHRGRPGLGRGYGYRVHHDVVAGDVHFEHPAPALAPNESPKDSPAHEVTGSGGAYMRFDVPRPRVQRSWPTFRALLLHRYVVARVIWADMLSIAVTYFITLCLFPGLESEIRHCILGEWLPILIMAVFNLSDFVGKILAALPVDWRGTHLLACSCLRVVFIPLFILCVYPSGMPALRHPAWPCIFSLLMGISNGYFGSVPMILAAGKVSPKQRELAGNTMTVSYMSGLTLGSAVAYCTYSLTRDAHGSCLHASTANGSILAGL

SEQ ID NO: 789 - protein, 388 aa, Homo sapiens
MEPSPAAGGLETTRLVSPRDRGGAGGSLRLKSLFTEPSEPLPEESKPVEMPFHHCHRDPLPPPGLTPERLHARRQLYAACAVCFVFMAGEVVGGYLAHSLAIMTDAAHLLADVGSMMGSLFSLWLSTRPATRTMTFGWHRSETLGALASVVSLWMVTGILLYLAFVRLLHSDYHIEGGAMLLTASIAVCANLLMAFVLHQAGPPHSHGSRGAEYAPLEEGPEEPLPLGNTSVRAAFVHVLGDLLQSFGVLAASILIYFKPQYKAADPISTFLFSICALGSTAPTLRDVLRILMEGTPRNVGFEPVRDTLLSVPGVRATHELHLWALTLTYHVASAHLAIDSTADPEAVLAEASSRLYSRFGFSSCTLQVEQYQPEMAQCLRCQEPPQA

SEQ ID NO: 790 - protein, 765 aa, Homo sapiens
MEEKYGGDVLAGPGGGGGLGPVDVPSARLTKYIVLLCFTKFLKAVGLFESYDLLKAVHIVQFIFILKLGTAFFMVLFQKPFSSGKTITKHQWIKIFKHAVAGCIISLLWFFGLTLCGPLRTLLLFEHSDIVVISLLSVLFTSSGGGPAKTRGAAFFIIAVICLLLFDNDDLMAKMAEHPEGHHDSALTHMLYTAIAFLGVADHKGGVLLLVLALCCKVGFHTASRKLSVDVGGAKRLQALSHLVSVLLLCPWVIVLSVTTESKVESWFSLIMPFATVIFFVMILDFYVDSICSVKMEVSKCARYGSFPIFISALLFGNFWTHPITDQLRAMNKAAHQESTEHVLSGGVVVSAIFFILSANILSSPSKRGQKGTLIGYSPEGTPLYNFMGDAFQHSSQSIPRFIKESLKQILEESDSRQIFYFLCLNLLFTFVELFYGVLTNSLGLISDGFHMLFDCSALVMGLFAALMSRWKATRIFSYGYGRIEILSGFINGLFLIVIAFFVFMESVARLIDPPELDTHMLTPVSVGGLIVNLIGICAFSHAHSHAHGASQGSCHSSDHSHSHHMHGHSDHGHGHSHGSAGGGMNANMRGVFLHVLADTLGSIGVIVSTVLIEQFGWFIADPLCSLFIAILIFLSVVPLIKDACQVLLLRLPPEYEKELHIALEKIQKIEGLISYRDPHFWRHSASIVAGTIHIQVTSDVLEQRIVQQVTGILKDAGVNNLTIQVEKEAYFQHMSGLSTGFHDVLAMTKQMESMKYCKDGTYIM

SEQ ID NO: 791 - protein, 549 aa, Homo sapiens
MSPTISHKDSSRQRRPGNFSHSLDMKSGPLPPGGWDDSHLDSAGREGDREALLGDTGTGDFLKAPQSFRAELSSILLLLFLYVLQGIPLGLAGSIPLILQSKNVSYTDQAFFSFVFWPFSLKLLWAPLVDAVYVKNFGRRKSWLVPTQYILGLFMIYLSTQVDRLLGNTDDRTPDVIALTVAFFLFEFLAATQDIAVDGWALTMLSRENVGYASTCNSVGQTAGYFLGNVLFLALESADFCNKYLRFQPQPRGIVTLSDFLFFWGTVFLITTTLVALLKKENEVSVVKEETQGITDTYKLLFAIIKMPAVLTFCLLILTAKIGFSAADAVTGLKLVEEGVPKEHLALLAVPMVPLQIILPLIISKYTAGPQPLNTFYKAMPYRLLLGLEYALLVWWTPKVEHQGGFPIYYYIVVLLSYALHQVTVYSMYVSIMAFNAKVSDPLIGGTYMTLLNTVSNLGGNWPSTVALWLVDPLTVKECVGASNQNCRTPDAVELCKKLGGSCVTALDGYYVESIICVFIGFGWWFFLGPKFKKLQDEGSSSWKCKRNN

SEQ ID NO: 792 - protein, 367 aa, Homo sapiens
MSSRSVLSPVVGTDAPDQHLELKKPQELKEMERLPLANEDKTMFANLKYVSLGILVFQTTSLVLTMRYSRTLKEEGPRYLSSTAVVVAELLKIMACILLVYKDSKCSLRALNRVLHDEILNKPMETLKLAIPSGIYTLQNNLLYVALSNLDAATYQVTYQLKILTTALFSVSMLSKKLGVYQWLSLVILMTGVAFVQWPSDSQLDSKELSAGSQFVGLMAVLTACFSSGFAGVYFEKILKETKQSVWIRNIQLGFFGSIFGLMGVYIYDGELVSKNGFFQGYNRLTWIVVVLQALGGLVIAAVIKYADNILKGFATSLSIILSTLISYFWLQDFVPTSVFFLGAILVITATFLYGYDPKPAGNPTKA

SEQ ID NO: 793 - protein, 1119 aa, Homo sapiens
MTAAAASNWGLITNIVNSIVGVSVLTMPFCFKQCGIVLGALLLVFCSWMTHQSCMFLVKSASLSKRRTYAGLAFHAYGKAGKMLVETSMIGLMLGTCIAFYVVIGDLGSNFFARLFGFQVGGTFRMFLLFAVSLCIVLPLSLQRNMMASIQSFSAMALLFYTVFMFVIVLSSLKHGLFSGQWLRRVSYVRWEGVFRCIPIFGMSFACQSQVLPTYDSLDEPSVKTMSSIFASSLNVVTTFYVMVGFFGYVSFTEATAGNVLMHFPSNLVTEMLRVGFMMSVAVGFPMMILPCRQALSTLLCEQQQKDGTFAAGGYMPPLRFKALTLSVVFGTMVGGILIPNVETILGLTGATMGSLICFICPALIYKKIHKNALSSQVVLWVGLGVLVVSTVTTLSVSEEVPEDLAEEAPGGRLGEAEGLMKVEAARLSAQDPVVAVAEDGREKPKLPKEREELEQAQIKGPVDVPGREDGKEAPEEAQLDRPGQGIAVPVGEAHRHEPPVPHDKVVVDEGQDREVPEENKPPSRHAGGKAPGVQGQMAPPLPDSEREKQEPEQGEVGKRPGQAQALEEAGDLPEDPQKVPEADGQPAVQPAKEDLGPGDRGLHPRPQAVLSEQQNGLAVGGGEKAKGGPPPGNAAGDTGQPAEDSDHGGKPPLPAEKPAPGPGLPPEPREQRDVERAGGNQAASQLEEAGRAEMLDHAVLLQVIKEQQVQQKRLLDQQEKLLAVIEEQHKEIHQQRQEDEEDKPRQVEVHQEPGAAVPRGQEAPEGKARETVENLPPLPLDPVLRAPGGRPAPSQDLNQRSLEHSEGPVGRDPAGPPDGGPDTEPRAAQAKLRDGQKDAAPRAAGTVKELPKGPEQVPVPDPAREAGGPEERLAEEFPGQSQDVTGGSQDRKKPGKEVAATGTSILKEANWLVAGPGAETGDPRMKPKQVSRDLGLAADLPGGAEGAAAQPQAVLRQPELRVISDGEQGGQQGHRLDHGGHLEMRKARGGDHVPVSHEQPRGGEDAAVQEPRQRPEPELGLKRAVPGGQRPDNAKPNRDLKLQAGSDLRRRRRDLGPHAEGQLAPRDGVIIGLNPLPDVQVNDLRGALDAQLRQAAGGALQVVHSRQLRQAPGPPEES

SEQ ID NO: 794 - protein, 342 aa, Homo sapiens
MLQGHSSVFQALLGTFFTWGMTAAGAALVFVFSSGQRRILDGSLGFAAGVMLAASYWSLLAPAVEMATSSGGFGAFAFFPVAVGFTLGAAFVYLADLLMPHLGAAEDPQTTLALNFGSTLMKKKSDPEGPALLFPESELSIRIGRAGLLSDKSENGEAYQRKKAAATGLPEGPAVPVPSRGNLAQPGGSSWRRIALLILAITIHNVPEGLAVGVGFGAIEKTASATFESARNLAIGIGIQNFPEGLAVSLPLRGAGFSTWRAFWYGQLSGMVEPLAGVFGAFAVVLAEPILPYALAFAAGAMVYVVMDDIIPEAQISGNGKLASWASILGFVVMMSLDVGLG

SEQ ID NO: 795 - skipped

SEQ ID NO: 796 - protein, 1118 aa, Homo sapiens
MEIKDQGAQMEPLLPTRNDEEAVVDRGGTRSILKTHFEKEDLEGHRTLFIGVHVPLGGRKSHRRHRHRGHKHRKRDRERDSGLEDGRESPSFDTPSQRVQFILGTEDDDEEHIPHDLFTELDEICWREGEDAEWRETARWLKFEEDVEDGGERWSKPYVATLSLHSLFELRSCILNGTVLLDMHANTLEEIADMVLDQQVSSGQLNEDVRHRVHEALMKQHHHQNQKKLTNRIPIVRSFADIGKKQSEPNSMDKNAGQVVSPQSAPACVENKNDVSRENSTVDFSKGLGGQQKGHTSPCGMKQRHEKGPPHQQEREVDLHFMKKIPPGAEASNILVGELEFLDRTVVAFVRLSPAVLLQGLAEVPIPTRFLFILLGPLGKGQQYHEIGRSIATLMTDEVFHDVAYKAKDRNDLVSGIDEFLDQVTVLPPGEWDPSIRIEPPKNVPSQEKRKIPAVPNGTAAHGEAEPHGGHSGPELQRTGRIFGGLILDIKRKAPYFWSDFRDAFSLQCLASFLFLYCACMSPVITFGGLLGEATEGRISAIESLFGASMTGIAYSLFGGQPLTILGSTGPVLVFEKILFKFCKEYGLSYLSLRASIGLWTATLCIILVATDASSLVCYITRFTEEAFASLICIIFIYEALEKLFELSEAYPINMHNDLELLTQYSCNCVEPHNPSNGTLKEWRESNISASDIIWENLTVSECKSLHGEYVGRACGHDHPYVPDVLFWSVILFFSTVTLSATLKQFKTSRYFPTKVRSIVSDFAVFLTILCMVLIDYAIGIPSPKLQVPSVFKPTRDDRGWFVTPLGPNPWWTVIAAIIPALLCTILIFMDQQITAVIINRKEHKLKKGCGYHLDLLMVAVMLGVCSIMGLPWFVAATVLSITHVNSLKLESECSAPGEQPKFLGIREQRVTGLMIFILMGSSVFMTSILKFIPMPVLYGVFLYMGASSLKGIQFFDRIKLFWMPAKHQPDFIYLRHVPLRKVHLFTIIQMSCLGLLWIIKVSRAAIVFPMMVLALVFVRKLMDLLFTKRELSWLDDLMPESKKKKLEDAEKEEEQSMLAMEDEGTVQLPLEGHYRDDPSVINISDEMSKTALWRNLLITADNSKDKESSFPSKSSPS

SEQ ID NO: 797 - protein, 599 aa, Homo sapiens [sequence omitted]

SEQ ID NO: 798 - protein, 620 aa, Homo sapiens
MSKSKCSVGLMSSVVAPAKEPNAVGPKEVELILVKEQNGVQLTSSTLTNPRQSPVEAQDRETWGKKIDFLLSVIGFAVDLANVWRFPYLCYKNGGGAFLVPYLLFMVIAGMPLFYMELALGQFNREGAAGVWKICPILKGVGFTVILISLYVGFFYNVIIAWALHYLFSSFTTELPWIHCNNSWNSPNCSDAHPGDSSGDSSGLNDTFGTTPAAEYFERGVLHLHQSHGIDDLGPPRWQLTACLVLVIVLLYFSLWKGVKTSGKVVWITATMPYVVLTALLLRGVTLPGAIDGIRAYLSVDFYRLCEASVWIDAATQVCFSLGVGFGVLIAFSSYNKFTNNCYRDAIVTTSINSLTSFSSGFVVFSFLGYMAQKHSVPIGDVAKDGPGLIFIIYPEAIATLPLSSAWAVVFFIMLLTLGIDSAMGGMESVITGLIDEFQLLHRHRELFTLFIVLATFLLSLFCVTNGGIYVFTLLDHFAAGTSILFGVLIEAIGVAWFYGVGQFSDDIQQMTGQRPSLYWRLCWKLVSPCFLLFVVVVSIVTFRPPHYGAYIFPDWANALGWVIATSSMAMVPIYAAYKFCSLPGSFREKLAYAIAPEKDRELVDRGEVRQFTLRHWLKV

SEQ ID NO: 799 - skipped

SEQ ID NO: 800 - protein, 630 aa, Homo sapiens
METTPLNSQKQLSACEDGEDCQENGVLQKVVPTPGDKVESGQISNGYSAVPSPGAGDDTRHSIPATTTTLVAELHQGERETWGKKVDFLLSVIGYAVDLGNVWRFPYICYQNGGGAFLLPYTIMAIFGGIPLFYMELALGQYHRNGCISIWRKICPIFKGIGYAICIIAFYIASYYNTIMAWALYYLISSFTDQLPWTSCKNSWNTGNCTNYFSEDNITWTLHSTSPAEEFYTRHVLQIHRSKGLQDLGGISWQLALCIMLIFTVIYFSIWKGVKTSGKVVWVTATFPYIILSVLLVRGATLPGAWRGVLFYLKPNWQKLLETGVWIDAAAQIFFSLGPGFGVLLAFASYNKFNNNCYQDALVTSVVNCMTSFVSGFVIFTVLGYMAEMRNEDVSEVAKDAGPSLLFITYAEAIANMPASTFFAIIFFLMLITLGLDSTFAGLEGVITAVLDEFPHVWAKRRERFVLAVVITCFFGSLVTLTFGGAYVVKLLEEYATGPAVLTVALIEAVAVSWFYGITQFCRDVKEMLGFSPGWFWRICWVAISPLFLLFIICSFLMSPPQLRLFQYNYPYWSIILGYCIGTSSFICIPTYIAYRLIITPGTFKERIIKSITPETPTEIPCGDIRLNAV

SEQ ID NO: 801 - protein, 635 aa, Homo sapiens
MAKKSAENGIYSVSGDEKKGPLIAPGPDGAPAKGDGPVGLGTPGGRLAVPPRETWTRQMDFIMSCVGFAVGLGNVWRFPYLCYKNGGGVFLIPYVLIALVGGIPIFFLEISLGQFMKAGSINVWNICPLFKGLGYASMVIVFYCNTYYIMVLAWGFYYLVKSFTTTLPWATCGHTWNTPDCVEIFRHEDCANASLANLTCDQLADRRSPVIEFWENKVLRLSGGLEVPGALNWEVTLCLLACWVLVYFCVWKGVKSTGKIVYFTATFPYVVLVVLLVRGVLLPGALDGIIYYLKPDWSKLGSPQVWIDAGTQIFFSYAIGLGALTALGSYNRFNNNCYKDAIILALINSGTSFFAGFVVFSILGFMAAEQGVHISKVAESGPGLAFIAYPRAVTLMPVAPLWAALFFFMLLLLGLDSQFVGVEGFITGLLDLLPASYYFRFQREISVALCCALCFVIDLSMVTDGGMYVFQLFDYYSASGTTLLWQAFWECVVVAWVYGADRFMDDIACMIGYRPCPWMKWCWSFFTPLVCMGIFIFNVVYYEPLVYNNTYVYPWWGEAMGWAFALSSMLCVPLHLLGCLLRAKGTMAERWQHLTQPIWGLHHLEYRAQDADVRGLTTLTPVSESSKVVVVESVM

SEQ ID NO: 802 - protein, 619 aa, Homo sapiens
MPWQAFRRFGQKLVRRRTLESGMAETRLARCLSTLDLVALGVGSTLGAGVYVLAGEVAKDKAGPSIVICFLVAALSSVLAGLCYAEFGARVPRSGSAYLYSYVTVGELWAFTTGWNLILSYVIGTASVARAWSSAFDNLIGNHISKTLQGSIALHVPHVLAEYPDFFALGLVLLLTGLLALGASESALVTKVFTGVNLLVLGFVMISGFVKGDVHNWKLTEEDYELAMAELNDTYSLGPLGSGGFVPFGFEGILRGAATCFYAFVGFDCIATTGEEAQNPQRSIPMGIVISLSVCFLAYFAVSSALTLMMPYYQLQPESPLPEAFLYIGWAPARYVVAVGSLCALSTSLLGSMFPMPRVIYAMAEDGLLFRVLARIHTGTRTPIIATVVSGIIAAFMAFLFKLTDLVDLMSIGTLLAYSLVSICVLILRYQPDQETKTGEEVELQEEAITTESEKLTLWGLFFPLNSIPTPLSGQIVYVCSSLLAVLLTALCLVLAQWSVPLLSGDLLWTAVVVLLLLLIIGIIVVIWRQPQSSTPLHFKVPALPLLPLMSIFVNIYLMMQMTAGTWARFGVWMLIGFAIYFGYGIQHSLEEIKSNQPSRKSRAKTVDLDPGTLYVHSV

SEQ ID NO: 803 - protein, 507 aa, Homo sapiens
MAGAGPKRRALAAPAAEEKEEAREKMLAAKSADGSAPAGEGEGVTLQRNITLLNGVAIIVGTIIGSGIFVTPTGVLKEAGSPGLALVVWAACGVFSIVGALCYAELGTTISKSGGDYAYMLEVYGSLPAFLKLWIELLIIRPSSQYIVALVFATYLLKPLFPTCPVPEEAAKLVACLCVLLLTAVNCYSVKAATRVQDAFAAAKLLALALIILLGFVQIGKGDVSNLDPNFSFEGTKLDVGNIVLALYSGLFAYGGWNYLNFVTEEMINPYRNLPLAIIISLPIVTLVYVLTNLAYFTTLSTEQMLSSEAVAVDFGNYHLGVMSWIIPVFVGLSCFGSVNGSLFTSSRLFFVGSREGHLPSILSMIHPQLLTPVPSLVFTCVMTLLYAFSKDIFSVINFFSFFNWLCVALAIIGMIWLRHRKPELERPIKVNLALPVFFILACLFLIAVSFWKTPVECGIGFTIILSGLPVYFFGVWWKNKPKWLLQGIFSTTVLCQKLMQVVPQET

SEQ ID NO: 804 - protein, 701 aa, Homo sapiens
MARRGWRRAPLRRGVGSSPRARRLMRPLWLLLAVGVFDWAGASDGGGGEARAMDEEIVSEKQAEESHRQDSANLLIFILLLTLTILTIWLFKHRRARFLHETGLAMIYGLLVGLVLRYGIHVPSDVNNVTLSCEVQSSPTTLLVNVSGKFYEYMLKGEISSHELNNVQDNEMLRKVTFDPEVFFNILLPPIIFYAGYSLKRRHFFRNLGSILAYAFLGTAISCFVIGSIMYGCVTLMKVTGQLAGDFYFTDCLLFGAIVSATDPVTVLAIFHELQVDVELYALLFGESVLNDAVAIVLSSSIVAYQPAGDNSHTFDVTAMFKSIGIFLGIFSGSFAMGAATGVVTALVTKFTKLREFQLLETGLFFLMSWSTFLLAEAWGFTGVVAVLFCGITQAHYTYNNLSTESQHRTKQLFELLNFLAENFIFSYMGLTLFTFQNHVFNPTFVVGAFVAIFLGRAANIYPLSLLLNLGRRSKIGSNFQHMMMFAGLRGAMAFALAIRDTATYARQMMFSTTLLIVFFTVWVFGGGTTAMLSCLHIRVGVDSDQEHLGVPENERRTTKAESAWLFRMWYNFDHNYLKPLLTHSGPPLTTTLPACCGPIARCLTSPQAYENQEQLKDDDSDLILNDGDISLTYGDSTVNTEPATSSAPRRFMGNSSEDALDRELAFGDHELVIRGTRLVLPMDDSEPPLNLLDNTRHGPA

SEQ ID NO: 805 - protein, 645 aa, Homo sapiens
MERQSRVMSEKDEYQFQHQGAVELLVFNFLLILTILTIWLFKNHRFRFLHETGGAMVYGLIMGLILRYATAPTDIESGTVYDCVKLTFSPSTLLVNITDQVYEYKYKREISQHNINPHQGNAILEKMTFDPEIFFNVLLPPIIFHAGYSLKKRHFFQNLGSILTYAFLGTAISCIVIGLIMYGFVKAMIHAGQLKNGDFHFTDCLFFGSLMSATDPVTVLAIFHELHVDPDLYTLLFGESVLNDAVAIVLTYSISIYSPKENPNAFDAAAFFQSVGNFLGIFAGSFAMGSAYAIITALLTKFTKLCEFPMLETGLFFLLSWSAFLSAEAAGLTGIVAVLFCGVTQAHYTYNNLSSDSKIRTKQLFEFMNFLAENVIFCYMGLALFTFQNHIFNALFILGAFLAIFVARACNIYPLSFLLNLGRKQKIPWNFQHMMMFSGLRGAIAFALAIRNTESQPKQMMFTTTLLLVFFTVWVFGGGTTPMLTWLQIRVGVDLDENLKEDPSSQHQEANNLDKNMTKAESARLFRMWYSFDHKYLKPILTHSGPPLTTTLPEWCGPISRLLTSPQAYGEQLKEDDVECIVNQDELAINYQEQASSPCSPPARLGLDQKASPQTPGKENIYEGDLGLGGYELKLEQTLGQSQLN

SEQ ID NO: 806 - protein, 702 aa, Homo sapiens
MDQHQHLNKTAESASSEKKKTRRCNGFKMFLAALSFSYIAKALGGIIMKISITQIERRFDISSSLAGLIDGSFEIGNLLVIVFVSYFGSKLHRPKLIGIGCLLMGTGSILTSLPHFFMGYYRYSKETHINPSENSTSSLSTCLINQTLSFNGTSPEIVEKDCVKESGSHMWIYVFMGNMLRGIGETPIVPLGISYIDDFAKEGHSSLYLGSLNAIGMIGPVIGFALGSLFAKMYVDIGYVDLSTIRITPKDSRWVGAWWLGFLVSGLFSIISSIPFFFLPKNPNKPQKERKISLSLHVLKTNDDRNQTANLTNQGKNVTKNVTGFFQSLKSILTNPLYVIFLLLTLLQVSSFIGSFTYVFKYMEQQYGQSASHANFLLGIITIPTVATGMFLGGFIIKKFKLSLVGIAKFSFLTSMISFLFQLLYFPLICESKSVAGLTLTYDGNNSVASHVDVPLSYCNSECNCDESQWEPVCGNNGITYLSPCLAGCKSSSGIKKHTVFYNCSCVEVTGLQNRNYSAHLGECPRDNTCTRKFFIYVAIQVINSLFSATGGTTFILLTVKIVQPELKALAMGFQSMVIRTLGGILAPIYFGALIDKTCMKWSTNSCGAQGACRIYNSVFFGRVYLGLSIALRFPALVLYIVFIFAMKKKFQGKDTKASDNERKVMDEANLEFLNNGEHFVPSAGTDSKTCNLDMQDNAAAN

SEQ ID NO: 807 - protein, 1523 aa, Homo sapiens
MAPGWAGVGAAVRARLALALALASVLSGPPAVACPTKCTCSAASVDCHGLGLRAVPRGIPRNAERLDLDRNNITRITKMDFAGLKNLRVLHLEDNQVSVIERGAFQDLKQLERLRLNKNKLQVLPELLFQSTPKLTRLDLSENQIQGIPRKAFRGITDVKNLQLDNNHISCIEDGAFRALRDLEILTLNNNNISRILVTSFNHMPKIRTLRLHSNHLYCDCHLAWLSDWLRQRRTVGQFTLCMAPVHLRGFNVADVQKKEYVCPAPHSEPPSCNANSISCPSPCTCSNNIVDCRGKGLMEIPANLPEGIVEIRLEQNSIKAIPAGAFTQYKKLKRIDISKNQISDIAPDAFQGLKSLTSLVLYGNKITEIAKGLFDGLVSLQLLLLNANKINCLRVNTFQDLQNLNLLSLYDNKLQTISKGLFAPLQSIQTLHLAQNPFVCDCHLKWLADYLQDNPIETSGARCSSPRRLANKRISQIKSKKFRCSGSEDYRSRFSSECFMDLVCPEKCRCEGTIVDCSNQKLVRIPSHLPEYVTDLRLNDNEVSVLEATGIFKKLPNLRKINLSNNKIKEVREGAFDGAASVQELMLTGNQLETVHGRVFRGLSGLKTLMLRSNLIGCVSNDTFAGLSSVRLLSLYDNRITTITPGAFTTLVSLSTINLLSNPFNCNCHLAWLGKWLRKRRIVSGNPRCQKPFFLKEIPIQDVAIQDFTCDGNEESSCQLSPRCPEQCTCMETVVRCSNKGLRALPRGMPKDVTELYLEGNHLTAVPRELSALRHLTLIDLSNNSISMLTNYTFSNMSHLSTLILSYNRLRCIPVHAFNGLRSLRVLTLHGNDISSVPEGSFNDLTSLSHLALGTNPLHCDCSLRWLSEWVKAGYKEPGIARCSSPEPMADRLLLTTPTHRFQCKGPVDINIVAKCNACLSSPCKNNGTCTQDPVELYRCACPYSYKGKDCTVPINTCIQNPCQHGGTCHLSDSHKDGFSCSCPLGFEGQRCEINPDDCEDNDCENNATCVDGINNYVCICPPNYTGELCDEVIDHCVPELNLCQHEAKCIPLDKGFSCECVPGYSGKLCETDNDDCVAHKCRHGAQCVDTINGYTCTCPQGFSGPFCEHPPPMVLLQTSPCDQYECQNGAQCIVVQQEPTCRCPPGFAGPRCEKLITVNFVGKDSYVELASAKVRPQANISLQVATDKDNGILLYKGDNDPLALELYQGHVRLVYDSLSSPPTTVYSVETVNDGQFHSVELVTLNQTLNLVVDKGTPKSLGKLQKQPAVGINSPLYLGGIPTSTGLSALRQGTDRPLGGFHGCIHEVRINNELQDFKALPPQSLGVSPGCKSCTVCKHGLCRSVEKDSVVCECRPGWTGPLCDQEARDPCLGHRCHHGKCVATGTSYMCKCAEGYGGDLCDNKNDSANACSAFKCHHGQCHISDQGEPYCLCQPGFSGEHCQQENPCLGQVVREVIRRQKGYASCATASKVPIMECRGGCGPQCCQPTRSKRRKYVFQCTDGSSFVEEVERHLECGCLACS

SEQ ID NO: 808 - protein, 958 aa, Homo sapiens
MHTCCPPVTLEQDLHRKMHSWMLQTLAFAVTSLVLSCAETIDYYGEICDNACPCEEKDGILTVSCENRGIISLSEISPPRFPIYHLLLSGNLLNRLYPNEFVNYTGASILHLGSNVIQDIETGAFHGLRGLRRLHLNNNKLELLRDDTFLGLENLEYLQVDYNYISVIEPNAFGKLHLLQVLILNDNLLSSLPNNLFRFVPLTHLDLRGNRLKLLPYVGLLQHMDKVVELQLEENPWNCSCELISLKDWLDSISYSALVGDVVCETPFRLHGRDLDEVSKQELCPRRLISDYEMRPQTPLSTTGYLHTTPASVNSVATSSSAVYKPPLKPPKGTRQPNKPRVRPTSRQPSKDLGYSNYGPSIAYQTKSPVPLECPTACSCNLQISDLGLNVNCQERKIESIAELQPKPYNPKKMYLTENYIAVVRRTDFLEATGLDLLHLGNNRISMIQDRAFGDLTNLRRLYLNGNRIERLSPELFYGLQSLQYLFLQYNLIREIQSGTFDPVPNLQLLFLNNNLLQAMPSGVFSGLTLLRLNLRSNHFTSLPVSGVLDQLKSLIQIDLHDNPWDCTCDIVGMKLWVEQLKVGVLVDEVICKAPKKFAETDMRSIKSELLCPDYSDVVVSTPTPSSIQVPARTSAVTPAVRLNSTGAPASLGAGGGASSVPLSVLILSLLLVFIMSVFVAAGLFVLVMKRRKKNQSDHTSTNNSDVSSFNMQYSVYGGGGGTGGHPHAHVHHRGPALPKVKTPAGHVYEYIPHPLGHMCKNPIYRSREGNSVEDYKDLHELKVTYSSNHHLQQQQQPPPPPQQPQQQPPPQLQLQPGEEERRESHHLRSPAYSVSTIEPREDLLSPVQDADRFYRGILEPDKHCSTTPAGNSLPEYPKFPCSPAAYTFSPNYDLRRPHQYLHPGAGDSRLREPVLYSPPSAVFVEPNRNEYLELKAKLNVEPDYLEVLEKQTTFSQF

SEQ ID NO: 809 - protein, 1590 aa, Homo sapiens
MSTPTDPGAMPHPGPSPGPGPSPGPILGPSPGPGPSPGSVHSMMGPSPGPPSVSHPMPTMGSTDFPQEGMHQMHKPIDGIHDKGIVEDIHCGSMKGTGMRPPHPGMGPPQSPMDQHSQGYMSPHPSPLGAPEHVSSPMSGGGPTPPQMPPSQPGALIPGDPQAMSQPNRGPSPFSPVQLHQLRAQILAYKMLARGQPLPETLQLAVQGKRTLPGLQQQQQQQQQQQQQQQQQQQQQQQPQQQPPQPQTQQQQQPALVNYNRPSGPGPELSGPSTPQKLPVPAPGGRPSPAPPAAAQPPAAAVPGPSVPQPAPGQPSPVLQLQQKQSRISPIQKPQGLDPVEILQEREYRLQARIAHRIQELENLPGSLPPDLRTKATVELKALRLLNFQRQLRQEVVACMRRDTTLETALNSKAYKRSKRQTLREARMTEKLEKQQKIEQERKRRQKHQEYLNSILQHAKDFKEYHRSVAGKIQKLSKAVATWHANTEREQKKETERIEKERMRRLMAEDEEGYRKLIDQKKDRRLAYLLQQTDEYVANLTNLVWEHKQAQAAKEKKKRRRRKKKAEENAEGGESALGPDGEPIDESSQMSDLPVKVTHTETGKVLFGPEAPKASQLDAWLEMNPGYEVAPRSDSEESDSDYEEEDEEEESSRQETEEKILLDPNSEEVSEKDAKQIIETAKQDVDDEYSMQYSARGSQSYYTVAHAISERVEKQSALLINGTLKHYQLQGLEWMVSLYNNNLNGILADEMGLGKTIQTIALITYLMEHKRLNGPYLIIVPLSTLSNWTYEFDKWAPSVVKISYKGTPAMRRSLVPQLRSGKFNVLLTTYEYIIKDKHILAKIRWKYMIVDEGHRMKNHHCKLTQVLNTHYVAPRRILLTGTPLQNKLPELWALLNFLLPTIFKSCSTFEQWFNAPFAMTGERVDLNEEETILIIRRLHKVLRPFLLRRLKKEVESQLPEKVEYVIKCDMSALQKILYRHMQAKGILLTDGSEKDKKGKGGAKTLMNTIMQLRKICNHPYMFQHIEESFAEHLGYSNGVINGAELYRASGKFELLDRILPKLRATNHRVLLFCQMTSLMTIMEDYFAFRNFLYLRLDGTTKSEDRAALLKKFNEPGSQYFIFLLSTRAGGLGLNLQAADTVVIFDSDWNPHQDLQAQDRAHRIGQQNEVRVLRLCTVNSVEEKILAAAKYKLNVDQKVIQAGMFDQKSSSHERRAFLQAILEHEEENEEEDEVPDDETLNQMIARREEEFDLFMRMDMDRRREDARNPKRKPRLMEEDELPSWIIKDDAEVERLTCEEEEEKIFGRGSRQRRDVDYSDALTEKQWLRAIEDGNLEEMEEEVRLKKRKRRRNVDKDPAKEDVEKAKKRRGRPPAEKLSPNPPKLTKQMNAIIDTVINYKDRCNVEKVPSNSQLEIEGNSSGRQLSEVFIQLPSRKELPEYYELIRKPVDFKKIKERIRNHKYRSLGDLEKDVMLLCHNAQTFNLEGSQIYEDSIVLQSVFKSARQKIAKEEESEDESNEEEEEEDEEESESEAKSVKVKIKLNKKDDKGRDKGKGKKRPNRGKAKPVVSDFDSDEEQDEREQSEGSGTDDE

SEQ ID NO: 810 - protein, 1214 aa, Homo sapiens
MAVRKKDGGPNVKYYEAADTVTQFDNVRLWLGKNYKKYIQAEPPTNKSLSSLVVQLLQFQEEVFGKHVSNAPLTKLPIKCFLDFKAGGSLCHILAAAYKFKSDQGWRRYDFQNPSRMDRNVEMFMTIEKSLVQNNCLSRPNIFLCPEIEPKLLGKLKDIIKRHQGTVTEDKNNASHVVYPVPGNLEEEEWVRPVMKRDKQVLLHWGYYPDSYDTWIPASEIEASVEDAPTPEKPRKVHAKWILDTDTFNEWMNEEDYEVNDDKNPVSRRKKISAKTLTDEVNSPDSDRRDKKGGNYKKRKRSPSPSPTPEAKKKNAKKGPSTPYTKSKRGHREEEQEDLTKDMDEPSPVPNVEEVTLPKTVNTKKDSESAPVKGGTMTDLDEQEDESMETTGKDEDENSTGNKGEQTKNPDLHEDNVTEQTHHIIIPSYAAWFDYNSVHAIERRALPEFFNGKNKSKTPEIYLAYRNFMIDTYRLNPQEYLTSTACRRNLAGDVCAIMRVHAFLEQWGLINYQVDAESRPTPMGPPPTSHFHVLADTPSGLVPLQPKTPQQTSASQQMLNFPDKGKEKPTDMQNFGLRTDMYTKKNVPSKSKAAASATREWTEQETLLLLEALEMYKDDWNKVSEHVGSRTQDECILHFLRLPIEDPYLEDSEASLGPLAYQPIPFSQSGNPVMSTVAFLASVVDPRVASAAAKSALEEFSKMKEEVPTALVEAHVRKVEEAAKVTGKADPAFGLESSGIAGTTSDEPERIEESGNDEARVEGQATDEKKEPKEPREGGGAIEEEAKEKTSEAPKKDEEKGKEGDSEKESEKSDGDPIVDPEKEKEPKEGQEEVLKEVVESEGERKTKVERDIGEGNLSTAAAAALAAAAVKAKHLAAVEERKIKSLVALLVETQMKKLEIKLRHFEELETIMDREREALEYQRQQLLADRQAFHMEQLKYAEMRARQQHFQQMHQQQQQPPPALPPGSQPIPPTGAAGPPAVHGLAVAPASVVPAPAGSGAPPGSLGPSEQIGQAGSTAGPQQQQPAGAPQPGAVPPGVPPPGPHGPSPFPNQQTPPSMMPGAVPGSGHPGVAGNAPLGLPFGMPPPPPPPAPSIIPFGSLADSISINLPAPPNLHGHHHHLPFAPGTLPPPNLPVSMANPLHPNLPATTTMPSSLPLGPGLGSAAAQSPAIVAAVQGNLLPSASPLPDPGTPLPPDPTAPSPGTVTPVPPPQ

SEQ ID NO: 811 - protein, 1217 aa, Homo sapiens
MYIKQVIIQGFRSYRDQTIVDPFSSKHNVIVGRNGSGKSNFFYAIQFVLSDEFSHLRPEQRLALLHEGTGPRVISAFVEIIFDNSDNRLPIDKEEVSLRRVIGAKKDQYFLDKKMVTKNDVMNLLESAGFSRSNPYYIVKQGKINQMATAPDSQRLKLLREVAGTRVYDERKEESISLMKETEGKREKINELLKYIEERLHTLEEEKEELAQYQKWDKMRRALEYTIYNQELNETRAKLDELSAKRETSGEKSRQLRDAQQDARDKMEDIERQVRELKTKISAMKEEKEQLSAERQEQIKQRTKLELKAKDLQDELAGNSEQRKRLLKERQKLLEKIEEKQKELAETEPKFNSVKEKEERGIARLAQATQERTDLYAKQGRGSQFTSKEERDKWIKKELKSLDQAINDKKRQIAAIHKDLEDTEANKEKNLEQYNKLDQDLNEVKARVEELDRKYYEVKNKKDELQSERNYLWREENAEQQALAAKREDLEKKQQLLRAATGKAILNGIDSINKVLDHFRRKGINQHVQNGYHGIVMNNFECEPAFYTCVEVTAGNRLFYHIVDSDEVSTKILMEFNKMNLPGEVTFLPLNKLDVRDTAYPETNDAIPMISKLRYNPRFDKAFKHVFGKTLICRSMEVSTQLARAFTMDCITLEGDQVSHRGALTGGYYDTRKSRLELQKDVRKAEEELGELEAKLNENLRRNIERINNEIDQLMNQMQQIETQQRKFKASRDSILSEMKMLKEKRQQSEKTFMPKQRSLQSLEASLHAMESTRESLKAELGTDLLSQLSLEDQKRVDALNDEIRQLQQENRQLLNERIKLEGIITRVETYLNENLRKRLDQVEQELNELRETEGGTVLTATTSELEAINKRVKDTMARSEDLDNSIDKTEAGIKELQKSMERWKNMEKEHMDAINHDTKELEKMTNRQGMLLKKKEECMKKIRELGSLPQEAFEKYQTLSLKQLFRKLEQCNTELKKYSHVNKKALDQFVNFSEQKEKLIKRQEELDRGYKSIMELMNVLELRKYEAIQLTFKQVSKNFSEVFQKLVPGGKATLVMKKGDVEGSQSQDEGEGSGESERGSGSQSSVPSVDQFTGVGIRVSFTGKQGEMREMQQLSGGQKSLVALALIFAIQKCDPAPFYLFDEIDQALDAQHRKAVSDMIMELAVHAQFITTTFRPELLESADKFYGVKFRNKVSHIDVITAEMAKDFVEDDTTHG

SEQ ID NO: 812 - protein, 1419 aa, Homo sapiens
MAEGLERVRISASELRGILATLAPQAGSRENMKELKEARPRKDNRRPDLEIYKPGLSRLRNKPKIKEPPGSEEFKDEIVNDRDCSAVENGTQPVKDVCKELNNQEQNGPIDPENNRGQESFPRTAGQEDRSLKIIKRTKKPDLQIYQPGRRLQTVSKESASRVEEEEVLNQVEQLRVEEDECRGNVAKEEVANKPDRAEIEKSPGGGRVGAAKGEKGKRMGKGEGVRETHDDPARGRPGSAKRYSRSDKRRNRYRTRSTSSAGSNNSAEGAGLTDNGCRRRRQDRTKERPRLKKQVSVSSTDSLDEDRIDEPDGLGPRRSSERKRHLERNWSGRGEGEQKNSAKEYRGTLRVTFDAEAMNKESPMVRSARDDMDRGKPDKGLSSGGKGSEKQESKNPKQELRGRGRGILILPAHTTLSVNSAGSPESAPLGPRLLFGSGSKGSRSWGRGGTTRRLWDPNNPDQKPALKTQTPQLHFLDTDDEVSPTSWGDSRQAQASYYKFQNSDNPYYYPRTPGPASQYPYTGYNPLQYPVGPTNGVYPGPYYPGYPTPSGQYVCSPLPTSTMSPEEVEQHMRNLQQQELHRLLRVADNQELQLSNLLSRDRISPEGLEKMAQLRAELLQLYERCILLDIEFSDNQNVDQILWKNAFYQVIEKFRQLVKDPNVENPEQIRNRLLELLDEGSDFFDSLLQKLQVTYKFKLEDYMDGLAIRSKPLRKTVKYALISAQRCMICQGDIARYREQASDTANYGKARSWYLKAQHIAPKNGRPYNQLALLAVYTRRKLDAVYYYMRSLAASNPILTAKESLMSLFEETKRKAEQMEKKQHEEFDLSPDQWRKGKKSTFRHVGDDTTRLEIWIHPSHPRSSQGTESGKDSEQENGLGSLSPSDLNKRFILSFLHAHGKLFTRIGMETFPAVAEKVLKEFQVLLQHSPSPIGSTRMLQLMTINMFAVHNSQLKDCFSEECRSVIQEQAAALGLAMFSLLVRRCTCLLKESAKAQLSSPEDQDDQDDIKVSSFVPDLKELLPSVKVWSDWMLGYPDTWNPPPTSLDLPSHVAVDVWSTLADFCNILTAVNQSEVPLYKDPDDDLTLLILEEDRLLSGFVPLLAAPQDPCYVEKTSDKVIAADCKRVTVLKYFLEALCGQEEPLLAFKGGKYVSVAPVPDTMGKEMGSQEGTRLEDEEEDVVIEDFEEDSEAEGSGGEDDIRELRAKKLALARKIAEQQRRQEKIQAVLEDHSQMRQMELEIRPLFLVPDTNGFIDHLASLARLLESRKYILVVPLIVINELDGLAKGQETDHRAGGYARVVQEKARKSIEFLEQRFESRDSCLRALTSRGNELESIAFRSEDITGQLGNNDDLILSCCLHYCKDKAKDFMPASKEEPIRLLREVVLLTDDRNLRVKALTRNVPVRDIPAFLTWAQVG

SEQ ID NO: 813 - protein, 206 aa, Homo sapiens
MAEDADMRNELEEMQRRADQLADESLESTRRMLQLVEESKDAGIRTLVMLDEQGEQLDRVEEGMNHINQDMKEAEKNLKDLGKCCGLFICPCNKLKSSDAYKKAWGNNQDGVVASQPARVVDEREQMAISGGFIRRVTNDARENEMDENLEQVSGIIGNLRHMALDMGNEIDTQNRQIDRIMEKADSNKTRIDEANQRATKMLGSG

SEQ ID NO: 814 - protein, 910 aa, Homo sapiens
MASSAQSGGSSGGPAVPTVQRGIIKMVLSGCAIIVRGQPRGGPPPERQINLSNIRAGNLARRAAATQPDAKDTPDEPWAFPAREFLRKKLIGKEVCFTIENKTPQGREYGMIYLGKDTNGENIAESLVAEGLATRREGMRANNPEQNRLSECEEQAKAAKKGMWSEGNGSHTIRDLKYTIENPRHFVDSHHQKPVNAIIEHVRDGSVVRALLLPDYYLVTVMLSGIKCPTFRREADGSETPEPFAAEAKFFTESRLLQRDVQIILESCHNQNILGTILHPNGNITELLLKEGFARCVDWSIAVYTRGAEKLRAAERFAKERRLRIWRDYVAPTANLDQKDKQFVAKVMQVLNADAIVVKLNSGDYKTIHLSSIRPPRLEGENTQDKNKKLRPLYDIPYMFEAREFLRKKLIGKKVNVTVDYIRPASPATETVPAFSERTCATVTIGGINIAEALVSKGLATVIRYRQDDDQRSSHYDELLAAEARAIKNGKGLHSKKEVPIHRVADISGDTQKAKQFLPFLQRAGRSEAVVEYVFSGSRLKLYLPKETCLITFLLAGIECPRGARNLPGLVQEGEPFSEEATLFTKELVLQREVEVEVESMDKAGNFIGWLHIDGANLSVLLVEHALSKVHFTAERSSYYKSLLSAEEAAKQKKEKVWAHYEEQPVEEVMPVLEEKERSASYKPVFVTEITDDLHFYVQDVETGTQLEKLMENMRNDIASHPPVEGSYAPRRGEFCIAKFVDGEWYRARVEKVESPAKIHVFYIDYGNREVLPSTRLGTLSPAFSTRVLPAQATEYAFAFIQVPQDDDARTDAVDSVVRDIQNTQCLLNVEHLSAGCPHVTLQFADSKGDVGLGLVKEGLVMVEVRKEKQFQKVITEYLNAQESAKSARLNLWRYGDFRADDADEFGYSR

SEQ ID NO: 815 - protein, 240 aa, Homo sapiens [sequence omitted]

SEQ ID NO: 816 - protein, 539 aa, Homo sapiens
MGTEGPPPPAASRGRQGCLLVPARTKTTIALLYDEESENAYDIRLKLTKEVLTIQKQDVVCVGGSHQGRNRRTVTLRRQPVGGLGLSIKGGSEHNVPVVISKIFEDQAADQTGMLFVGDAVLQVNGIHVENATHEEVVHLLRNAGDEVTITVEYLREAPAFLKLPLGSPGPSSDHSSGASSPLFDSGLHLNGNSSTTAPSSPSSPIAKDPRYEKRWLDTLSVPLSMARISRYKAGTEKLRWNAFEVLALDGVSSGILRFYTAQDGTDWLRAVSANIRELTLQNMKMANKCCSPSDQVVHMGWVNEKLQGADSSQTFRPKFLALKGPSFYVFSTPPVSTFDWVRAERTYHLCEVLFKVHKFWLTEDCWLQANLYLGLQDFDFEDQRPYCFSIVAGHGKSHVFNVELGSELAMWEKSFQRATFMEVQRTGSRTYMCSWQGEMLCFTVDFALGFTCFESKTKNVLWRFKFSQLKGSSDDGKTRVKLLFQNLDTKQIETKELEFQDLRAVLHCIHSFIAAKVASVDPGFMDSQSLARKYMYSS

SEQ ID NO: 817-818 - skipped (2 entries)

SEQ ID NO: 819 - protein, 946 aa, Homo sapiens
MVPWVRTMGQKLKQRLRLDVGREICRQYPLFCFLLLCLSAASLLLNRYIHILMIFWSFVAGVVTFYCSLGPDSLLPNIFFTIKYKPKQLGLQELFPQGHSCAVCGKVKCKRHRPSLLLENYQPWLDLKISSKVDASLSEVLELVLENFVYPWYRDVTDDESFVDELRITLRFFASVLIRRIHKVDIPSIITKKLLKAAMKHIEVIVKARQKVKNTEFLQQAALEEYGPELHVALRSRRDELHYLRKLTELLFPYILPPKATDCRSLTLLIREILSGSVFLPSLDFLADPDTVNHLLIIFIDDSPPEKATEPASPLVPFLQKFAEPRNKKPSVLKLELKQIREQQDLLFRFMNFLKQEGAVHVLQFCLTVEEFNDRILRPELSNDEMLSLHEELQKIYKTYCLDESIDKIRFDPFIVEEIQRIAEGPYIDVVKLQTMRCLFEAYEHVLSLLENVFTPMFCHSDEYFRQLLRGAESPTRNSKLNRGSLSLDDFRNTQKRGESFGISRIGSKIKGVFKSTTMEGAMLPNYGVAEGEDDFIEEGIVVMEDDSPVEAVSTPNTPRNLAAWKISIPYVDFFEDPSSERKEKKERIPVFCIDVERNDRRAVGHEPEHWSVYRRYLEFYVLESKLTEFHGAFPDAQLPSKRIIGPKNYEFLKSKREEFQEYLQKLLQHPELSNSQLLADFLSPNGGETQFLDKILPDVNLGKIIKSVPGKLMKEKGQHLEPFIMNFINSCESPKPKPSRPELTILSPTSENNKKLFNDLFKNNANRAENTERKQNQNYFMEVMTVEGVYDYLMYVGRVVFQVPDWLHHLLMGTRILFKNTLEMYTDYYLQCKLEQLFQEHRLVSLITLLRDAIFCENTEPRSLQDKQKGAKQTFEEMMNYIPDLLVKCIGEETKYESIRLLFDGLQQPVLNKQLTYVLLDIVIQELFPELNKVQKEVTSVTSWM

SEQ ID NO: 820 - protein, 992 aa, Homo sapiens
MKTETVPPFQETPAGSSCHLNNLLSSRKLMAVGVLLGWLLVIHLLVNVWLLCLLSALLVVLGGWLGSSLAGVASGRLHLERFIPLATCPPCPEAERQLEREINRTIQMIIRDFVLSWYRSVSQEPAFEEEMEAAMKGLVQELRRRMSVMDSHAVAQSVLTLCGCHLQSYIQAKEATAGKNGPVEPSHLWEAYCRATAPHPAVHSPSAEVTYTRGVVNLLLQGLVPKPHLETRTGRHVVVELITCNVILPLISRLSDPDWIHLVLVGIFSKARDPAPCPASAPEQPSVPTSLPLIAEVEQLPEGRASPVAAPVFLSYSEPEGSAGPSPEVEEGHEAVEGDLGGMCEERKVGNNSSHFLQPNVRGPLFLCEDSELESPLSELGKETIMLMTPGSFLSDRIQDALCALESSQALEPKDGEASEGAEAEEGPGTETETGLPVSTLNSCPEIHIDTADKEIEQGDVTASVTALLEGPEKTCPSRPSCLEKDLTNDVSSLDPTLPPVLLSSSPPGPLSSATFSFEPLSSPDGPVIIQNLRITGTITAREHSGTGFHPYTLYTVKYETALDGENSSGLQQLAYHTVNRRYREFLNLQTRLEEKPDLRKFIKNVKGPKKLFPDLPFGNMDSDRVEARKSLLESFLKQLCAIPEIANSEEVQEFLALNTDARIAFVKKPFMVSRIDKMVVSAIVDTLKTAFPRSEPQSPTEELSEAETESKPQTEGKKASKSRLRFSSSKISPALSVTEAQDKILYCLQEGNVESETLSMSAMESFIEKQTKLLEMQPTKAPEKDPEQPPKGRVDSCVSDAAVPAQDPSNSDPGTETELADTALDLLLLLLTEQWKWLCTENMQKFLRLIFGTLVQRWLEVQVANLTSPQRWVQYLLLLQESIWPGGVLPKFPRPVRTQEQKLAAEKQALQSLMGVLPDLVVEILGVNKCRLSWGLVLESLQQPLINRHLIYCLGDIILEFLDLSASVEESAATTSASDTPGNSKRMGVSS

SEQ ID NO: 821 - protein, 154 aa, Homo sapiens [sequence omitted]

SEQ ID NO: 822 - protein, 763 aa, Homo sapiens [sequence omitted]

SEQ ID NO: 823 - protein, 664 aa, Homo sapiens
MKTGLFFLCLLGTAAAIPTNARLLSDHSKPTAETVAPDNTAIPSLRAEAEENEKETAVSTEDDSHHKAEKSSVLKSKEESHEQSAEQGKSSSQELGLKDQEDSDGHLSVNLEYAPTEGTLDIKEDMSEPQEKKLSENTDFLAPGVSSFTDSNQQESITKREENQEQPRNYSHHQLNRSSKHSQGLRDQGNQEQDPNISNGEEEEEKEPGEVGTHNDNQERKTELPREHANSKQEEDNTQSDDILEESDQPTQVSKMQEDEFDQGNQEQEDNSNAEMEEENASNVNKHIQETEWQSQEGKTGLEAISNHKETEEKTVSEALLMEPTDDGNTTPRNHGVDDDGDDDGDDGGTDGPRHSASDDYFIPSQAFLEAERAQSIAYHLKIEEQREKVHENENIGTTEPGEHQEAKKAENSSNEEETSSEGNMRVHAVDSCMSFQCKRGHICKADQQGKPHCVCQDPVTCPPTKPLDQVCGTDNQTYASSCHLFATKCRLEGTKKGHQLQLDYFGACKSIPTCTDFEVIQFPLRMRDWLKNILMQLYEANSEHAGYLNEKQRNKVKKIYLDEKRLLAGDHPIDLLLRDFKKNYHMYVYPVHWQFSELDQHPMDRVLTHSELAPLRASLVPMEHCITRFFEECDPNKDKHITLKEWGHCFGIKEEDIDENLLF

SEQ ID NO: 824 - protein, 616 aa, Homo sapiens
MNSPGGRGKKKGSGGASNPVPPRPPPPCLAPAPPAAGPAPPPESPHKRNLYYFSYPLFVGFALLRLVAFHLGLLFVWLCQRFSRALMAAKRSSGAAPAPASASAPAPVPGGEAERVRVFHKQAFEYISIALRIDEDEKAGQKEQAVEWYKKGIEELEKGIAVIVTGQGEQCERARRLQAKMMTNLVMAKDRLQLLEKMQPVLPFSKSQTDVYNDSTNLACRNGHLQSESGAVPKRKDPLTHTSNSLPRSKTVMKTGSAGLSGHHRAPSYSGLSMVSGVKQGSGPAPTTHKGTPKTNRTNKPSTPTTATRKKKDLKNFRNVDSNLANLIMNEIVDNGTAVKFDDIAGQDLAKQALQEIVILPSLRPELFTGLRAPARGLLLFGPPGNGKTMLAKAVAAESNATFFNISAASLTSKYVGEGEKLVRALFAVARELQPSIIFIDEVDSLLCERREGEHDASRRLKTEFLIEFDGVQSAGDDRVLVMGATNRPQELDEAVLRRFIKRVYVSLPNEETRLLLLKNLLCKQGSPLTQKELAQLARMTDGYSGSDLTALAKDAALGPIRELKPEQVKNMSASEMRNIRLSDFTESLKKIKRSVSPQTLEAYIRWNKDFGDTTV

SEQ ID NO: 825 - protein, 3230 aa, Homo sapiens
MQSSPSPAHPQLPVLQTQMVSDGMTGSNPVSPASSSSPASSGAGGISPQHIAQDSSLDGPPGPPDGATVPLEGFSLSQAADLANKGPKWEKSHAEIAEQAKHEAEIETRIAELRKEGFWSLKRLPKVPEPPRPKGHWDYLCEEMQWLSADFAQERRWKRGVARKVVRMVIRHHEEQRQKEERARREEQAKLRRIASTMAKDVRQFWSNVEKVVQFKQQSRLEEKRKKALDLHLDFIVGQTEKYSDLLSQSLNQPLTSSKAGSSPCLGSSSAASSPPPPASRLDDEDGDFQPQEDEEEDDEETIEVEEQQEGNDAEAQRREIELLRREGELPLEELLRSLPPQLLEGPSSPSQTPSSHDSDTRDGPEEGAEEEPPQVLEIKPPPSAVTQRNKQPWHPDEDDEEFTANEEEAEDEEDTIAAEEQLEGEVDHAMELSELAREGELSMEELLQQYAGAYAPGSGSSEDEDEDEVDANSSDCEPEGPVEAEEPPQEDSSSQSDSVEDRSEDEEDEHSEEEETSGSSASEESESEESEDAQSQSQADEEEEDDDFGVEYLLARDEEQSEADAGSGPPTPGPTTLGPKKEITDIAAAAESLQPKGYTLATTQVKTPIPLLLRGQLREYQHIGLDWLVTMYEKKLNGILADEMGLGKTIQTISLLAHLACEKGNWGPHLIIVPTSVMLNWEMELKRWCPSFKILTYYGAQKERKLKRQGWTKPNAFHVCITSYKLVLQDHQAFRRKNWRYLILDEAQNIKNFKSQRWQSLLNFNSQRRLLLTGTPLQNSLMELWSLMHFLMPHVFQSHREFKEWFSNPLTGMIEGSQEYNEGLVKRLHKVLRPFLLRRVKVDVEKQMPKKYEHVIRCRLSKRQRCLYDDFMAQTTTKETLATGHFMSVINILMQLRKVCNHPNLFDPRPVTSPFITPGICFSTASLVLRATDVHPLQRIDMGRFDLIGLEGRVSRYEADTFLPRHRLSRRVLLEVATAPDPPPRPKPVKMKVNRMLQPVPKQEGRTVVVVNNPRAPLGPVPVRPPPGPELSAQPTPGPVPQVLPASLMVSASPAGPPLIPASRPPGPVLLPPLQPNSGSLPQVLPSPLGVLSGTSRPPTPTLSLKPTPPAPVRLSPAPPPGSSSLLKPLTVPPGYTFPPAAATTTSTTTATATTTAVPAPTPAPQRLILSPDMQARLPSGEVVSIGQLASLAQRPVANAGGSKPLTFQIQGNKLTLTGAQVRQLAVGQPRPLQRNVVHLVSAGGQHHLISQPAHVALIQAVAPTPGPTPVSVLPSSTPSTTPAPTGLSLPLAANQVPPTMVNNTGVVKIVVRQAPRDGLTPVPPLAPAPRPPSSGLPAVLNPRPTLTPGRLPTPTLGTARAPMPTPTLVRPLLKLVHSPSPEVSASAPGAAPLTISSPLHVPSSLPGPASSPMPIPNSSPLASPVSSTVSVPLSSSLPISVPTTLPAPASAPLTIPISAPLTVSASGPALLTSVTPPLAPVVPAAPGPPSLAPSGASPSASALTLGLATAPSLSSSQTPGHPLLLAPTSSHVPGLNSTVAPACSPVLVPASALASPFPSAPNPAPAQASLLAPASSASQALATPLAPMAAPQTAILAPSPAPPLAPLPVLAPSPGAAPVLASSQTPVPVMAPSSTPGTSLASASPVPAPTPVLAPSSTQTMLPAPVPSPLPSPASTQTLALAPALAPTLGGSSPSQTLSLGTGNPQGPFPTQTLSLTPASSLVPTPAQTLSLAPGPPLGPTQTLSLAPAPPLAPASPVGPAPAHTLTLAPASSSASLLAPASVQTLTLSPAPVPTLGPAAAQTLALAPASTQSPASQASSLVVSASGAAPLPVTMVSRLPVSKDEPDTLTLRSGPPSPPSTATSFGGPRPRRQPPPPPRSPFYLDSLEEKRKRQRSERLERIFQLSEAHGALAPVYGTEVLDFCTLPQPVASPIGPRSPGPSHPTFWTYTEAAHRAVLFPQQRLDQLSEIIERFIFVMPPVEAPPPSLHACHPPPWLAPRQAAFQEQLASELWPRARPLHRIVCNMRTQFPDLRLIQYDCGKLQTLAVLLRQLKAEGHRVLIFTQMTRMLDVLEQFLTYHGHLYLRLDGSTRVEQRQALMERFNADKRIFCFILSTRSGGVGVNLTGADTVVFYDSDWNPTMDAQAQDRCHRIGQTRDVHIYRLISERTVEENILKKANQKRMLGDMAIEGGNFTTAYFKQQTIRELFDMPLEEPSSSSVPSAPEEEEETVASKQTHILEQALCRAEDEEDIRAATQAKAEQVAELAEFNENDGFPAGEGEEAGRPGAEDEEMSRAEQEIAALVEQLTPIERYAMKFLEASLEEVSREELKQAEEQVEAARKDLDQAKEEVFRLPQEEEEGPGAGDESSCGTGGGTHRRSKKAKAPERPGTRVSERLRGARAETQGANHTPVISAHQTRSTTTPPRCSPARERVPRPAPRPRPTPASAPAAIPALVPVPVSAPVPISAPNPITILPVHILPSPPPPSQIPPCSSPACTPPPACTPPPAHTPPPAQTCLVTPSSPLLLGPPSVPISASVTNLPLGLRPEAELCAQALASPESLELASVASSETSSLSLVPPKDLLPVAVEILPVSEKNLSLTPSAPSLTLEAGSIPNGQEQEAPDSAEGTTLTVLPEGEELPLCVSESNGLELPPSAASDEPLQEPLEADRTSEELTEAKTPTSSPEKPQELVTAEVAAPSTSSSATSSPEGPSPARPPRRRTSADVEIRGQGTGRPGQPPGPKVLRKLPGRLVTVVEEKELVRRRRQQRGAASTLVPGVSETSASPGSPSVRSMSGPESSPPIGGPCEAAPSSSLPTPPQQPFIARRHIELGVTGGGSPENGDGALLAITPPAVKRRRGRPPKKNRSPADAGRGVDEAPSSTLKGKTNGADPVPGPETLIVADPVLEPQLIPGPQPLGPQPVHRPNPLLSPVEKRRRGRPPKARDLPIPGTISSAGDGNSESRTQPPPHPSPLTPLPPLLVCPTATVANTVTTVTISTSPPKRKRGRPPKNPPSPRPSQLPVLDRDSTSVLESCGLGRRRQPQGQGESEGSSSDEDGSRPLTRLARLRLEAEGMRGRKSGGSMVVAVIQDDLDLADSGPGGLELTPPVVSLTPKLRSTRLRPGSLVPPLETEKLPRKRAGAPVGGSPGLAKRGRLQPPSPLGPEGSVEESEAEASGEEEEGDGTPRRRPGPRRLVGTTNQGDQRILRSSAPPSLAGPAVSHRGRKAKT

SEQ ID NO: 826 - protein, 254 aa, Homo sapiens
MQVQCQQSPVLAGSATLVALGALALYVAKPSGYGKHTESLKPAATRLPARAAWFLQELPSFAVPAGILARQPLSLFGPPGTVLLGLFCLHYFHRTFVYSLLNRGRPYPAILILRGTAFCTGNGVLQGYYLIYCAEYPDGWYTDIRFSLGVFLFILGMGINIHSDYILRQLRKPGEISYRIPQGGLFTYVSGANFLGEIIEWIGYALATWSLPALAFAFFSLCFLGLRAFHHHRFYLKMFEDYPKSRKALIPFIF

SEQ ID NO: 827 - protein, 1099 aa, Homo sapiens
MSSQTKFKKDKEIIAEYEAQIKEIRTQLVEQFKCLEQQSESRLQLLQDLQEFFRRKAEIELEYSRSLEKLAERFSSKIRSSREHQFKKDQYLLSPVNCWYLVLHQTRRESRDHATLNDIFMNNVIVRLSQISEDVIRLFKKSKEIGLQMHEELLKVTNELYTVMKTYHMYHAESISAESKLKEAEKQEEKQFNKSGDLSMNLLRHEDRPQRRSSVKKIEKMKEKRQAKYSENKLKCTKARNDYLLNLAATNAAISKYYIHDVSDLIDCCDLGFHASLARTFRTYLSAEYNLETSRHEGLDVIENAVDNLDSRSDKHTVMDMCNQVFCPPLKFEFQPHMGDEVCQVSAQQPVQTELLMRYHQLQSRLATLKIENEEVRKTLDATMQTLQDMLTVEDFDVSDAFQHSRSTESVKSAASETYMSKINIAKRRANQQETEMFYFTKFKEYVNGSNLITKLQAKHDLLKQTLGEGERAECGTTRPPCLPPKPQKMRRPRPLSVYSHKLFNGSMEAFIKDSGQAIPLVVESCIRYINLYGLQQQGIFRVPGSQVEVNDIKNSFERGEDPLVDDQNERDINSVAGVLKLYFRGLENPLFPKERFQDLISTIKLENPAERVHQIQQILVTLPRVVIVVMRYLFAFLNHLSQYSDENMMDPYNLAICFGPTLMHIPDGQDPVSCQAHINEVIKTIIIHHEAIFPSPRELEGPVYEKCMAGGEEYCDSPHSEPGAIDEVDHDNGTEPHTSDEEVEQIEAIAKFDYMGRSPRELSFKKGASLLLYHRASEDWWEGRHNGVDGLIPHQYIVVQDMDDAFSDSLSQKADSEASSGPLLDDKASSKNDLQSPTEHISDYGFGGVMGRVRLRSDGAAIPRRRSGGDTHSPPRGLGPSIDTPPRAAACPSSPHKIPLTRGRIESPEKRRMATFGSAGSINYPDKKALSEGHSMRSTCGSTRHSSLGDHKSLEAEALAEDIEKTMSTALHELRELERQNTVKQAPDVVLDTLEPLKNPPGPVSSEPASPLHTIVIRDPDAAMRRSSSSSTEMMTTFKPALSARLAGAQLRPPPMRPVRPVVQHRSSSSSSSGVGSPAVTPTEKMFPNSSADKSGTM

SEQ ID NO: 828 - protein, 611 aa, Homo sapiens
MASVQQGEKQLFEKFWRGTFKAVATPRPESIIVASITARKPLPRTEPQNNPVVPAQDGPSEKLGQHLATEPLGTNSWERDKTCRELGATRGHSASHDKDLTPPPSSRGKKKKKKSTRKKRRRSSSYSPSPVKKKKKKSSKKHKRRRSFSKKRRHSSSSPKSKRRDEKRHKKQSRSRPRKSHRHRHHRCPSRSQSSESRPSSCESRHRGRSPEEGQKSRRRHSRRCSKTLCKDSPEAQSSRPPSQPLQMLGYLSARGVITGSGSAADLFTKTASPLTTSRGRSQEYDSGNDTSSPPSTQTSSARSRGQEKGSPSGGLSKSRELNSGNTSDSGNSFTTSSPQNKGAMLENLSPTSRGRESRGFQSPCLECAEVKKSSLVPSTARSSPMKGCSRSSSYASTRSSSHSSRSPNPRASPRYTQSRSTSSEKRSYSRSPSYSSKSGKRSPPSRSSRSRRSPSYSRYSPSRERDPKYSEKDSQQRERERARRRRRSYSPMRKRRRDSPSHLEARRITSARKRPIPYYRPSPSSSGSLSSTSSWYSSSSSRSASRSYSRSRSRSRSRRRSRTRTSSSSSSRSPSPGSRSRSRSRSRSRSRSRSQSRSYSSADSYSSTRR

SEQ ID NO: 829 - protein, 5147 aa, Homo sapiens
MLLPALLFGMAWALADGRWCEWTETIRVEEEVAPRQEDLVPCASLDHYSRLGWRLDLPWSGRSGLTRSPAPGLCPIYKPPETRPAKWNRTVRTCCPGWGGAHCTEALAKASPEGHCFAMWQCQLQAGSANASAGSLEECCARPWGQSWWDGSSQACRSCSSRHLPGSASSPALLQPLAGAVGQLWSQHQRPSATCASWSGFHYRTFDGRHYHFLGRCTYLLAGAADSTWAVHLTPGDRCPQPGHCQRVTMGPEEVLIQAGNVSVKGQLVPEGQSWLLHGLSLQWLGDWLVLSGGLGVVVRLDRTGSISISVDHELWGQTQGLCGLYNGWPEDDFMEPGGGLAMLAATFGNSWRLPGSESGCLDAVEVAQGCDPLGLIDADVEPGHLRAEAQDVCHQLLEGPFGQCHAQVSPAEYHEACLFAYCAGAMAGSGQEGRQQAVCATFASYVQACARRHIHIRWRKPGFCERLCPGGQLYSDCVSLCPPSCEAVGQGEEESCREECVSGCECPRGLFWNGTLCVPAAHCPCYYCRQRYVPGDTVRQLCNPCVCRDGRWHCAQALCPAECAVGGDGHYLTFDGRSYSFWGGQGCRYSLVQDYVKGQLLILLEHGACDAGSCLHAISVSLEDTHIQLRDSGAVLVNGQDVGLPWIGAEGLSVRRASSAFLLLRWPGAQVLWGLSDPVAYITLDPRHAHQVQGLCGTFTQNQQDDFLTPAGDVETSIAAFASKFQVAGKGRCPSEDSALLSPCTTHSQRHAFAEAACAILHSSVFQECHRLVDKEPFYLRCLAAVCGCDPGSDCLCPVLSAYARRCAQEGASPPWRNQTLCPVMCPGGQEYRECAPACGQHCGKPEDCGELGSCVAGCNCPLGLLWDPEGQCVPPSLCPCQLGARRYAPGSATMKECNRCICQERGLWNCTARHCPSQAFCPRELVYAPGACLLTCDSPSANHSCPAGSTDGCVCPPGTVLLDERCVPPDLCPCRHSGQWYLPNATIQEDCNVCVCRGRQWHCTGQRRSGRCQASGAPHYVTFDGLAFTYPGACEYLLVREASGLFTVSAQNLPCGASGLTCTKALAVRLEGTVVHMLRGRAVTVNGVSVTPPKVYTGPGLSLRRAGLFLLLSTHLGLTLLWDGGTRVLVQLSPQFRGRVAGLCGDFDGDASNDLRSRQGVLEPTAELAAHSWRLSPLCPEPGDLPHPCTMNTHRAGWARARCGALLQPLFTLCHAEVPPQQHYEWCLYDACGCDSGGDCECLCSAIATYADECARHGHHVRWRSQELCSLQCEGGQVYEACGPTCPPTCHEQHPEPGWHCQVVACVEGCFCPEGTLLHGGACLEPASCPCEWGRNSFPPGSVLQKDCGNCTCQEGQWHCGGDGGHCEELVPACAEGEALCQENGHCVPHGWLCDNQDDCGDGSDEEGCAAPGCGEGQMTCSSGHCLPLALLCDRQDDCGDGTDEPSYPCPQGLLACADGRCLPPALLCDGHPDCLDAADEESCLGQVTCVPGEVSCVDGTCLGAIQLCDGVWDCPDGADEGPGHCPLPSLPTPPASTLPGPSPGSLDTASSPLASASPAPPCGPFEFRCGSGECTPRGWRCDQEEDCADGSDERGCGGPCAPHHAPCARGPHCVSPEQLCDGVRQCPDGSDEGPDACGGLPALGGPNRTGLPCPEYTCPNGTCIGFQLVCDGQPDCGRPGQVGPSPEEQGCGAWGPWSPWGPCSRTCGPWGQGRSRRCSPLGLLVLQNCPGPEHQSQACFTAACPVDGEWSTWSPWSVCSEPCRGTMTRQRQCHSPQNGGRTCAALPGGLHSTRQTKPCPQDGCPNATCSGELMFQPCAPCPLTCDDISGQVTCPPDWPCGSPGCWCPEGQVLGSEGWCVWPRQCPCLVDGARYWPGQRIKADCQLCICQDGRPRRCRLNPDCAVDCGWSSWSPWAKCLGPCGSQSIQWSFRSSNNPRPSGRGRQCRGIHRKARRCQTEPCEGCEHQGQVHRVGERWHGGPCRVCQCLHNLTAHCSPYCPLGSCPQGWVLVEGTGESCCHCALPGENQTVQPMATPAAAPAPSPQIRFPLATYILPPSGDPCYSPLGLAGLAEGSLHASSQQLEHPTQAALLGAPTQGPSPQGWHAGGDAYAKWHTRPHYLQLDLLQPRNLTGILVPETGSSNAYASSFSLQFSSNGLHWHDYRDLLPGILPLPKLFPRNWDDLDPAVWTFGRMVQARFVRVWPHDVHHSDVPLQVELLGCEPGSPPAPLCPGVGLRCASGECVLRGGPCDGVLDCEDGSDEEGCVLLPEGTGRFHSTAKTLALSSAQPGQLLHWPREGLAETEHWPPGQESPTSPTETRPVSPGPASGVPHHGESVQMVTTTPIPQMEARTLPPGMAAVTVVPPHPVTPATPAGQSVAPGPFPPVQCGPGQTPCEVLGCVEQAQVCDGREDCLDGSDERHCARNLLMWLPSLPALWAASTVPFMMPTMALPGLPASRALCSPSQLSCGSGECLSAERRCDLRPDCQDGSDEDGCVDCVLAPWSVWSSCSRSCGLGLTFQRQELLRPPLPGGSCPRDRFRSQSCFVQACPVAGAWAMWEAWGPCSVSCGGGHQSRQRSCVDPPPKNGGAPCPGASQERAPCGLQPCSGGTDCELGRVYVSADLCQKGLVPPCPPSCLDPKANRSCSGHCVEGCRCPPGLLLHDTRCLPLSECPCLVGEELKWPGVSFLLGNCSQCVCEKGELLCQPGGCPLPCGWSAWSSWAPCDRSCGSGVRARFRSPSNPPAAWGGAPCEGDRQELQGCHTVCGTEVFGWTPWTSWSSCSQSCLAPGGGPGWRSRSRLCPSPGDSSCPGDATQEEPCSPPVCPVPSIWGLWAPWSTCSAPCDGGIQTRGRSCSSLAPGDTTCPGPHSQTRDCNTQPCTAQCPENMLFRSAEQCHQEGGPCPRLCLTQGPGIECTGFCAPGCTCPPGLFLHNASCLPRSQCPCQLHGQLYASGAMARLDSCNNCTCVSGKMACTSERCPVACGWSPWTLWSLCSCSCNVGIRRRFRAGTAPPAAFGGAECQGPTMEAEFCSLRPCPGPGGEWGPWSPCSVPCGGGYRNRTRGSSRSLMEFSTCGLQPCAGPVPGMCPRDKQWLDCAQGPASCAELSAPRGTNQTCHPGCHCPSGMLLLNNVCVPTQDCPCAHEGHLYPPGSTVVRPCENCSCVSGLIANCSSWPCAEGEPTWSPWTPWSQCSASCGPARCHRHRFCARSPSAVPSTVAPLPLPATPTPLCSGPEAEEEPCLLQGCDRAGGWGPWGPWSHCSRSCGGGLRSRTRACDQPPPQGLGDYCEGPRAQGEVCQALPCPVTNCTAIEGAEYSPCGPPCPRSCDDLVHCVWRCQPGCYCPPGQVLSSNGAICVQPGHCSCLDLLTGQRHHPGARLARPDGCNHCTCLEGRLNCTDLPCPVPGGWCPWSEWTMCSQPCRGQTRSRSRACACPTPQHGGAPCTGEAGEAGAQHQREACPSYATCPVDGAWGPWGPWSPCDMCLGQSHRSRACSRPPTPEGGRPCPGNHTQSRPCQENSTQCTDCGGGQSLHPCGQPCPRSCQDLSPGSVCQPGSVGCQPTCGCPLGQLSQDGLCVPPAHCRCQYQPGAMGIPENQSRSAGSRFSSWESLEPGEVVTGPCDNCTCVAGILQCQEVPDCPDPGVWSSWGPWEDCSVSCGGGEQLRSRRCARPPCPGPARQSRTCSTQVCREAGCPAGRLYRECQPGEGCPFSCAHVTQQVGCFSEGCEEGCHCPEGTFQHRLACVQECPCVLTAWLLQELGATIGDPGQPLGPGDELDSGQTLRTSCGNCSCAHGKLSCSLDDCFEADGGFGPWSPWGPCSRSCGGLGTRTRSRQCVLTMPTLSGQGCRGPRQDLECPSPDCPGAEGSTVEPVTGLPGGWGPWSSWSPCSRSCTDPARPAWRSRTRLCLANCTMGDPLQERPCNLPSCTELPVCPGPGCGAGNCSWTSWAPWEPCSRSCGVGQQRRLRAYRPPGPGGHWCPNILTAYQERRFCNLRACPVPGGWSRWSPWSWCDRSCGGGQSLRSRSCSSPPSKNGGAPCAGERHQARLCNPMPCEAGCPAGMEVVTCANRCPRRCSDLQEGIVCQDDQVCQKGCRCPKGSLEQDGGCVPIGHCDCTDAQGHSWAPGSQHQDACNNCSCQAGQLSCTAQPCPPPTHCAWSHWSAWSPCSHSCGPRGQQSRFRSSTSGSWAPECREEQSQSQPCPQPSCPPLCLQGTRSRTLGDSWLQGECQRCSCTPEGVICEDTECAVPEAWTLWSSWSDCPVSCGGGNQVRTRACRAAAPHHRSPPCLGPDTQTRQQPCPGLLEACSWGPWGPCSRSCGPGLASRSGSCPCLMAKADPTCNSTFLHLDTQGCYSGPCPEECVWSSWSSWTRCSCRVLVQQRYRHQGPASRGARAGAPCTRLDGHFRPCLISNCSEDSCTPPFEFHACGSPCAGLCATHLSHQLCQDLPPCQPGCYCPKGLLEQAGGCIPPEECNCWHTSAAGAGMTLAPGDRLQLGCKECECRRGELHCTSQGCQGLLPLSEWSEWSPCGPCLPPSALAPASRTALEEHWLRDPTGLSPTLAPLLASEQHRHRLCLDPATGRPWTGAPHLCTAPLSQQRLCPDPGACPDSCQWSLWGPWSPCQVPCSGGFRLRWREAEALCGGGCREPWAQESCNGGPCPECEAQDTVFTLDCANQCPHSCADLWDRVQCLQGPCRPGCRCPPGQLVQDGRCVPISSCRCGLPSANASWELAPAQAVQLDCQNCTCVNESLVCPHQECPVLGPWSAWSSCSAPCGGGTMERHRTCEGGPGVAPCQAQDTEQRQECNLQPCPECPPGQVLSACATSCPCLCWHLQPGAICVQEPCQPGCGCPGGQLLHNGTCVPPTACPCTQHSLPWGLTLTLEEQAQELPPGTVLTRNCTRCVCHGGAFSCSLVDCQVPPGETWQQVAPGELGLCEQTCLEMNATKTQSNCSSARASGCVCQPGHFRSQAGPCVPEDHCECWHLGRPHLPGSEWQEACESCLCLSGRPVCTQHCSPLTCAQGEEMVLEPGSCCPSCRREAPEEQSPSCQLLTELRNFTKGTCYLDQVEVSYCSGYCPSSTHVMPEEPYLQSQCDCCSYRLDPESPVRILNLRCLGGHTEPVVLPVIHSCQCSSCQGGDFSKR

SEQ ID NO: 830 - protein, 585 aa, Homo sapiens
MAEAATGFLEQLKSCIVWSWTYLWTVWFFIVLFLVYILRVPLKINDNLSTVSMFLNTLTPKFYVALTGTSSLISGLILIFEWWYFRKYGTSFIEQVSVSHLRPLLGGVDNNSSNNSNSSNGDSDSNRQSVSECKVWRNPLNLFRGAEYNRYTWVTGREPLTYYDMNLSAQDHQTFFTCDSDHLRPADAIMQKAWRERNPQARISAAHEALEINEIRSRVEVPLIASSTIWEIKLLPKCATAYILLAEEEATTIAEAEKLFKQALKAGDGCYRRSQQLQHHGSQYEAQHRRDTNVLVYIKRRLAMCARRLGRTREAVKMMRDLMKEFPLLSMFNIHENLLEALLELQAYADVQAVLAKYDDISLPKSATICYTAALLKARAVSDKFSPEAASRRGLSTAEMNAVEAIHRAVEFNPHVPKYLLEMKSLILPPEHILKRGDSEAIAYAFFHLAHWKRVEGALNLLHCTWEGTFRMIPYPLEKGHLFYPYPICTETADRELLPSFHEVSVYPKKELPFFILFTAGLCSFTAMLALLTHQFPELMGVFAKAMIDIFCSAEFRDWNCKSIFMRVEDELEIPPAPQSQHFQN

SEQ ID NO: 831 - protein, 375 aa, Homo sapiens
MQLQFRSWMLAALTLLVVFLIFADISEIEEEIGNSGGRGTIRSAVNSLHSKSNRAEVVINGSSSPAVVDRSNESIKHNIQPASSKWRHNQTLSLRIRKQILKFLDAEKDISVLKGTLKPGDIIHYIFDRDSTMNVSQNLYELLPRTSPLKNKHFGTCAIVGNSGVLLNSGCGQEIDAHSFVIRCNLAPVQEYARDVGLKTDLVTMNPSVIQRAFEDLVNATWREKLLQRLHSLNGSILWIPAFMARGGKERVEWVNELILKHHVNVRTAYPSLRLLHAVRGYWLTNKVHIKRPTTGLLMYTLATRFCKQIYLYGFWPFPLDQNQNPVKYHYYDSLKYGYTSQASPHTMPLEFKALKSLHEQGALKLTVGQCDGAT

SEQ ID NO: 832 - protein, 1258 aa, Homo sapiens
MITSELPVLQDSTNETTAHSDAGSELEETEVKGKRKRGRPGRPPSTNKKPRKSPGEKSRIEAGIRGAGRGRANGHPQQNGEGEPVTLFEVVKLGKSAMQSVVDDWIESYKQDRDIALLDLINFFIQCSGCRGTVRIEMFRNMQNAEIIRKMTEEFDEDSGDYPLTMPGPQWKKFRSNFCEFIGVLIRQCQYSIIYDEYMMDTVISLLTGLSDSQVRAFRHTSTLAAMKLMTALVNVALNLSIHQDNTQRQYEAERNKMIGKRANERLELLLQKRKELQENQDEIENMMNSIFKGIFVHRYRDAIAEIRAICIEEIGVWMKMYSDAFLNDSYLKYVGWTLHDRQGEVRLKCLKALQSLYTNRELFPKLELFTNRFKDRIVSMTLDKEYDVAVEAIRLVTLILHGSEEALSNEDCENVYHLVYSAHRPVAVAAGEFLHKKLFSRHDPQAEEALAKRRGRNSPNGNLIRMLVLFFLESELHEHAAYLVDSLWESSQELLKDWECMTELLLEEPVQGEEAMSDRQESALIELMVCTIRQAAEAHPPVGRGTGKRVLTAKERKTQIDDRNKLTEHFIITLPMLLSKYSADAEKVANLLQIPQYFDLEIYSTGRMEKHLDALLKQIKFVVEKHVESDVLEACSKTYSILCSEEYTIQNRVDIARSQLIDEFVDRFNHSVEDLLQEGEEADDDDIYNVLSTLKRLTSFHNAHDLTKWDLFGNCYRLLKTGIEHGAMPEQIVVQALQCSHYSILWQLVKITDGSPSKEDLLVLRKTVKSFLAVCQQCLSNVNTPVKEQAFMLLCDLLMIFSHQLMTGGREGLQPLVFNPDTGLQSELLSFVMDHVFIDQDEENQSMEGDEEDEANKIEALHKRRNLLAAFSKLIIYDIVDMHAAADIFKHYMKYYNDYGDIIKETLSKTRQIDKIQCAKTLILSLQQLFNELVQEQGPNLDRTSAHVSGIKELARRFALTFGLDQIKTREAVATLHKDGIEFAFKYQNQKGQEYPPPNLAFLEVLSEFSSKLLRQDKKTVHSYLEKFLTEQMMERREDVWLPLISYRNSLVTGGEDDRMSVNSGSSSSKTSSVRNKKGRPPLHKKRVEDESLDNTWLNRTDTMIQTPGPLPAPQLTSTVLRENSRPMGDQIQEPESEHGSEPDFLHNPQMQISWLGQPKLEDLNRKDRTGMNYMKVRTGVRHAVRGLMEEDAEPIFEDVMMSSRSQLEDMNEEFEDTMVIDLPPSRNRRERAELRPDFFDSAAIIEDDSGFGMPMF

SEQ ID NO: 833 - protein, 750 aa, Homo sapiens
MSQWYELQQLDSKFLEQVHQLYDDSFPMEIRQYLAQWLEKQDWEHAANDVSFATIRFHDLLSQLDDQYSRFSLENNFLLQHNIRKSKRNLQDNFQEDPIQMSMIIYSCLKEERKILENAQRFNQAQSGNIQSTVMLDKQKELDSKVRNVKDKVMCIEHEIKSLEDLQDEYDFKCKTLQNREHETNGVAKSDQKQEQLLLKKMYLMLDNKRKEVVHKIIELLNVTELTQNALINDELVEWKRRQQSACIGGPPNACLDQLQNWFTIVAESLQQVRQQLKKLEELEQKYTYEHDPITKNKQVLWDRTFSLFQQLIQSSFVVERQPCMPTHPQRPLVLKTGVQFTVKLRLLVKLQELNYNLKVKVLFDKDVNERNTVKGFRKFNILGTHTKVMNMEESTNGSLAAEFRHLQLKEQKNAGTRTNEGPLIVTEELHSLSFETQLCQPGLVIDLETTSLPVVVISNVSQLPSGWASILWYNMLVAEPRNLSFFLTPPCARWAQLSEVLSWQFSSVTKRGLNVDQLNMLGEKLLGPNASPDGLIPWTRFCKENINDKNFPFWLWIESILELIKKHLLPLWNDGCIMGFISKERERALLKDQQPGTFLLRFSESSREGAITFTWVERSQNGGEPDFHAVEPYTKKELSAVTFPDIIRNYKVMAAENIPENPLKYLYPNIDKDHAFGKYYSRPKEAPEPMELDGPKGTGYIKTELISVSEVHPSRLQTTDNLLPMSPEEFDEVSRIVGSVEFDSMMNTV

SEQ ID NO: 834 - protein, 545 aa, Homo sapiens
MAEPSGSPVHVQLPQQAAPVTAAAAAAPAAATAAPAPAAPAAPAPAPAPAAQAVGWPICRDAYELQEVIGSGATAVVQAALCKPRQERVAIKRINLEKCQTSMDELLKEIQAMSQCSHPNVVTYYTSFVVKDELWLVMKLLSGGSMLDIIKYIVNRGEHKNGVLEEAIIATILKEVLEGLDYLHRNGQIHRDLKAGNILLGEDGSVQIADFGVSAFLATGGDVTRNKVRKTFVGTPCWMAPEVMEQVRGYDFKADMWSFGITAIELATGAAPYHKYPPMKVLMLTLQNDPPTLETGVEDKEMMKKYGKSFRKLLSLCLQKDPSKRPTAAELLKCKFFQKAKNREYLIEKLLTRTPDIAQRAKKVRRVPGSSGHLHKTEDGDWEWSDDEMDEKSEEGKAAFSQEKSRRVKEENPEIAVSASTIPEQIQSLSVHDSQGPPNANEDYREASSCAVNLVLRLRNSRKELNDIRFEFTPGRDTADGVSQELFSAGLVDGHDVVIVAANLQKIVDDPKALKTLTFKLASGCDGSEIPDEVKLIGFAQLSVS

SEQ ID NO: 835 - protein, 288 aa, Homo sapiens
MKDRTQELRTAKDSDDDDDVAVTVDRDRFMDEFFEQVEEIRGFIDKIAENVEEVKRKHSAILASPNPDEKTKEELEELMSDIKKTANKVRSKLKSIEQSIEQEEGLNRSSADLRIRKTQHSTLSRKFVEVMSEYNATQSDYRERCKGRIQRQLEITGRTTTSEELEDMLESGNPAIFASGIIMDSSISKQALSEIETRHSEIIKLENSIRELHDMFMDMAMLVESQGEMIDRIEYNVEHAVDYVERAVSDTKKAVKYQSKARRKKIMIIICCVILGIVIASTVGGIFA

SEQ ID NO: 836 - protein, 603 aa, Homo sapiens [sequence omitted]

SEQ ID NO: 837 - protein, 1151 aa, Homo sapiens
MRKFNIRKVLDGLTAGSSSASQQQQQQHPPGNREPEIQETLQSEHFQLCKTVRHGFPYQPSALAFDPVQKILAVGTQTGALRLFGRPGVECYCQHDSGAAVIQLQFLINEGALVSALADDTLHLWNLRQKRPAILHSLKFCRERVTFCHLPFQSKWLYVGTERGNIHIVNVESFTLSGYVIMWNKAIELSSKSHPGPVVHISDNPMDEGKLLIGFESGTVVLWDLKSKKADYRYTYDEAIHSVAWHHEGKQFICSHSDGTLTIWNVRSPAKPVQTITPHGKQLKDGKKPEPCKPILKVEFKTTRSGEPFIILSGGLSYDTVGRRPCLTVMHGKSTAVLEMDYSIVDFLTLCETPYPNDFQEPYAVVVLLEKDLVLIDLAQNGYPIFENPYPLSIHESPVTCCEYFADCPVDLIPALYSVGARQKRQGYSKKEWPINGGNWGLGAQSYPEIIITGHADGSVKFWDASAITLQVLYKLKTSKVFEKSRNKDDRPNTDIVDEDPYAIQIISWCPESRMLCIAGVSAHVIIYRFSKQEVITEVIPMLEVRLLYEINDVETPEGEQPPPLPTPVGGSNPQPIPPQSHPSTSSSSSDGLRDNVPCLKVKNSPLKQSPGYQTELVIQLVWVGGEPPQQITSLAVNSSYGLVVFGNCNGIAMVDYLQKAVLLNLGTIELYGSNDPYRREPRSPRKSRQPSGAGLCDISEGTVVPEDRCKSPTSGSSSPHNSDDEQKMNNFIEKVKTKSRKFSKMVANDIAKMSRKLSLPTDLKPDLDVKDNSFSRSRSSSVTSIDKESREAISALHFCETFTRKTDSSPSPCLWVGTTLGTVLVIALNLPPGGEQRLLQPVIVSPSGTILRLKGAILRMAFLDTTGCLIPPAYEPWREHNVPEEKDEKEKLKKRRPVSVSPSSSQEISENQYAVICSEKQAKVISLPTQNCAYKQNITETSFVLRGDIVALSNSICLACFCANGHIMTFSLPSLRPLLDVYYLPLTNMRIARTFCFTNNGQALYLVSPTEIQRLTYSQETCENLQEMLGELFTPVETPEAPNRGFFKGLFGGGAQSLDREELFGESSSGKASRSLAQHIPGPGGIEGVKGAASGVVGELARARLALDERGQKLGDLEERTAAMLSSAESFSKHAHEIMLKYKDKKWYQF

SEQ ID NO: 838 - protein, 422 aa, Homo sapiens
MGMTRMLLECSLSDKLCVIQEKQYEVIIVPTLLVTIFLILLGVILWLFIREQRTQQQRSGPQGIAPVPPPRDLSWEAGHGGNVALPLKETSVENFLGATTPALAKLQVPREQLSEVLEQICSGSCGPIFRANMNTGDPSKPKSVILKALKEPAGLHEVQDFLGRIQFHQYLGKHKNLVQLEGCCTEKLPLYMVLEDVAQGDLLSFLWTCRRDVMTMDGLLYDLTEKQVYHIGKQVLLALEFLQEKHLFHGDVAARNILMQSDLTAKLCGLGLAYEVYTRGAISSTQTIPLKWLAPERLLLRPASIRADVWSFGILLYEMVTLGAPPYPEVPPTSILEHLQRRKIMKRPSSCTHTMYSIMKSCWRWREADRPSPRELRLRLEAAIKTADDEAVLQVPELVVPELYAAVAGIRVESLFYNYSML

SEQ ID NO: 839 - protein, 440 aa, Homo sapiens
MASPVAAQAGKLLRALALRPRFLAAGSQAVQLTSRRWLNLQEYQSKKLMSDNGVRVQRFFVADTANEALEAAKRLNAKEIVLKAQILAGGRGKGVFNSGLKGGVHLTKDPNVVGQLAKQMIGYNLATKQTPKEGVKVNKVMVAEALDISRETYLAILMDRSCNGPVLVGSPQGGVDIEEVAASNPELIFKEQIDIFEGIKDSQAQRMAENLGFVGPLKSQAADQITKLYNLFLKIDATQVEVNPFGETPEGQVVCFDAKINFDDNAEFRQKDIFAMDDKSENEPIENEAAKYDLKYIGLDGNIACFVNGAGLAMATCDIIFLNGGKPANFLDLGGGVKEAQVYQAFKLLTADPKVEAILVNIFGGIVNCAIIANGITKACRELELKVPLVVRLEGTFMEKKGSYMHIKQETGNSNENITGIQENVAHQNLSKCAISIFLC

SEQ ID NO: 840 - protein, 352 aa, Homo sapiens
MFRGLSSWLGLQQPVAGGGQPNGDAPPEQPSETVAESAEEELQQAGDQELLHQAKDFGNYLFNFASAATKKITESVAETAQTIKKSVEEGKIDGIIDKTIIGDFQKEQKKFVEEQHTKKSEAAVPPWVDTNDEETIQQQILALSADKRNFLRDPPAGVQFNFDFDQMYPVALVMLQEDELLSKMRFALVPKLVKEEVFWRNYFYRVSLIKQSAQLTALAAQQQAAGKEEKSNGREQDLPLAEAVRPKTPPVVIKSQLKTQEDEEEISTSPGVSEFVSDAFDACNLNQEDLRKEMEQLVLDKKQEETAVLEEDSADWEKELQQELQEYEVVTESEKRDENWDKEIEKMLQEEN

SEQ ID NO: 841 - protein, 705 aa, Homo sapiens
MNYLRRRLSDSNFMANLPNGYMTDLQRPQPPPPPPGAHSPGATPGPGTATAERSSGVAPAASPAAPSPGSSGGGGFFSSLSNAVKQTTAAAAATFSEQVGGGSGGAGRGGAASRVLLVIDEPHTDWAKYFKGKKIHGEIDIKVEQAEFSDLNLVAHANGGFSVDMEVLRNGVKVVRSLKPDFVLIRQHAFSMARNGDYRSLVIGLQYAGIPSVNSLHSVYNFCDKPWVFAQMVRLHKKLGTEEFPLIDQTFYPNHKEMLSSTTYPVVVKMGHAHSGMGKVKVDNQHDFQDIASVVALTKTYATAEPFIDAKYDVRVQKIGQNYKAYMRTSVSGNWKTNTGSAMLEQIAMSDRYKLWVDTCSEIFGGLDICAVEALHGKDGRDHIIEVVGSSMPLIGDHQDEDKQLIVELVVNKMAQALPRQRQRDASPGRGSHGQTPSPGALPLGRQTSQQPAGPPAQQRPPPQGGPPQPGPGPQRQGPPLQQRPPPQGQQHLSGLGPPAGSPLPQRLPSPTSAPQQPASQAAPPTQGQGRQSRPVAGGPGAPPAARPPASPSPQRQAGPPQATRQTSVSGPAPPKASGAPPGGQQRQGPPQKPPGPAGPTRQASQAGPVPRTGPPTTQQPRPSGPGPAGRPKPQLAQKPSQDVPPPATAAAGGPPHPQLNKSQSLTNAFNLPEPAPPRPSLSQDEVKAETIRSLRKSFASLFSD

SEQ ID NO: 842 - protein, 582 aa, Homo sapiens
MMNFLRRRLSDSSFIANLPNGYMTDLQRPEPQQPPPPPPPGPGAASASAAPPTASPGPERRPPPASAPAPQPAPTPSVGSSFFSSLSQAVKQTAASAGLVDAPAPAPAAARKAKVLLVVDEPHADWAKCFRGKKVLGDYDIKVEQAEFSELNLVAHADGTYAVDMQVLRNGTKVVRSFRPDFVLIRQHAFGMAENEDFRHLIIGMQYAGLPSINSLESIYNFCDKPWVFAQLVAIYKTLGGEKFPLIEQTYYPNHKEMLTLPTFPVVVKIGHAHSGMGKVKVENHYDFQDIASVVALTQTYATAEPFIDSKYDIRVQKIGNNYKAYMRTSISGNWKTNTGSAMLEQIAMSDRYKLWVDTCSEMFGGLDICAVKAVHGKDGKDYIFEVMDCSMPLIGEHQVEDRQLITELVISKMNQLLSRTPALSPQRPLTTQQPQSGTLKDPDSSKTPPQRPPPQGGPGQPQGMQPPGKVLPPRRLPPGPSLPPSSSSSSSSSSSAPQRPGGPTTHGDAPSSSSSLAEAQPPLAAPPQKPQPHPQLNKSQSLTNAFSFSESSFFRSSANEDEAKAETIRSLRKSFASLFSD

SEQ ID NO: 843 - protein, 580 aa, Homo sapiens
MNFLRRRLSDSSFMANLPNGYMTDLQRPDSSTSSPASPAMERRHPQPLAASFSSPGSSLFSSLSSAMKQAPQATSGLMEPPGPSTPIVQRPRILLVIDDAHTDWSKYFHGKKVNGEIEIRVEQAEFSELNLAAYVTGGCMVDMQVVRNGTKVVSRSFKPDFILVRQHAYSMALGEDYRSLVIGLQYGGLPAVNSLYSVYNFCSKPWVFSQLIKIFHSLGPEKFPLVEQTFFPNHKPMVTAPHFPVVVKLGHAHAGMGKIKVENQLDFQDITSVVAMAKTYATTEAFIDSKYDIRIQKIGSNYKAYMRTSISGNWKANTGSAMLEQVAMTERYRLWVDSCSEMFGGLDICAVKAVHSKDGRDYIIEVMDSSMPLIGEHVEEDRQLMADLVVSKMSQLPMPGGTAPSPLRPWAPQIKSAKSPGQAQLGPQLGQPQPRPPPQGGPRQAQSPQPQRSGSPSQQRLSPQGQQPLSPQSGSPQQQRSPGSPQLSRASSGSSPNQASKPGATLASQPRPPVQGRSTSQQGEESKKPAPPHPHLNKSQSLTNSLSTSDTSQRGTPSEDEAKAETIRNLRKSFASLFSD

SEQ ID NO: 844 - protein, 8797 aa, Homo sapiens
MATSRGASRCPRDIANVMQRLQDEQEIVQKRTFTKWINSHLAKRKPPMVVDDLFEDMKDGVKLLALLEVLSGQKLPCEQGRRMKRIHAVANIGTALKFLEGRKIKLVNINSTDIADGRPSIVLGLMWTIILYFQIEELTSNLPQLQSLSSSASSVDSIVSSETPSPPSKRKVTTKIQGNAKKALLKWVQYTAGKQTGIEVKDFGKSWRSGVAFHSVIHAIRPELVDLETVKGRSNRENLEDAFTIAETELGIPRLLDPEDVDVDKPDEKSIMTYVAQFLKHYPDIHNASTDGQEDDEILPGFPSFANSVQNFKREDRVIFKEMKVWIEQFERDLTRAQMVESNLQDKYQSFKHFRVQYEMKRKQIEHLIQPLHRDGKLSLDQALVKQSWDRVTSRLFDWHIQLDKSLPAPLGTIGAWLYRAEVALREEITVQQVHEETANTIQRKLEQHKDLLQNTDAHKRAFHEIYRTRSVNGIPVPPDQLEDMAERFHFVSSTSELHLMKMEFLELKYRLLSLLVLAESKLKSWIIKYGRRESVEQLLQNYVSFIENSKFFEQYEVTYQILKQTAEMYVKADGSVEEAENVMKFMNETTAQWRNLSVEVRSVRSMLEEVISNWDRYGNTVASLQAWLEDAEKMLNQSENAKKDFFRNLPHWIQQHTAMNDAGNFLIETCDEMVSRDLKQQLLLLNGRWRELFMEVKQYAQADEMDRMKKEYTDCVVTLSAFATEAHKKLSEPLEVSFMNVKLLIQDLEDIEQRVPVMDAQYKIITKTAHLITKESPQEEGKEMFATMSKLKEQLTKVKECYSPLLYESQQLLIPLEELEKQMTSFYDSLGKINEIITVLEREAQSSALFKQKHQELLACQENCKKTLTLIEKGSQSVQKFVTLSNVLKHFDQTRLQRQIADIHVAFQSMVKKTGDWKKHVETNSRLMKKFEESRAELEKVLRIAQEGLEEKGDPEELLRRHTEFFSQLDQRVLNAFLKACDELTDILPEQEQQGLQEAVRKLHKQWKDLQGEAPYHLLHLKIDVEKNRFLASVEECRTELDRETKLMPQEGSEKIIKEHRVFFSDKGPHHLCEKRLQLIEELCVKLPVRDPVRDTPGTCHVTLKELRAAIDSTYRKLMEDPDKWKDYTSRFSEFSSWISTNETQLKGIKGEAIDTANHGEVKRAVEEIRNGVTKRGETLSWLKSRLKVLTEVSSENEAQKQGDELAKLSSSFKALVTLLSEVEKMLSNFGDCVQYKEIVKNSLEELISGSKEVQEQAEKILDTENLFEAQQLLLHHQQKTKRISAKKRDVQQQIAQAQQGEGGLPDRGHEELRKLESTLDGLERSRERQERRIQVTLRKWERFETNKETVVRYLFQTGSSHERFLSFSSLESLSSELEQTKEFSKRTESIAVQAENLVKEASEIPLGPQNKQLLQQQAKSIKEQVKKLEDTLEEDIKTMEMVKTKWDHFGSNFETLSVWITEKEKELNALETSSSAMDMQISQIKVTIQEIESKLSSIVGLEEEAQSFAQFVTTGESARIKAKLTQIRRYGEELREHAQCLEGTILGHLSQQQKFEENLRKIQQSVSEFEDKLAVPIKICSSATETYKVLQEHMDLCQALESLSSAITAFSASARKVVNRDSCVQEAAALQQQYEDILRRAKERQTALENLLAHWQRLEKELSSFLTWLERGEAKASSPEMDISADRVKVEGELQLIQALQNEVVSQASFYSKLLQLKESLFSVASKDDVKMMKLHLEQLDERWRDLPQIINKRINFLQSVVAEHQQFDELLLSFSVWIKLFLSELQTTSEISIMDHQVALTRHKDHAAEVESKKGELQSLQGHLAKLGSLGRAEDLHLLQGKAEDCFQLFEEASQVVERRQLALSHLAEFLQSHASLSGILRQLRQTVEATNSMNKNESDLIEKDLNDALQNAKALESAAVSLDGILSKAQYHLKIGSSEQRTSCRATADQLCGEVERIQNLLGTKQSEADALAVLKKAFQDQKEELLKSIEDIEERTDKERLKEPTRQALQQRLRVFNQLEDELNSHEHELCWLKDKAKQIAQKDVAFAPEVDREINRLEVTWDDTKRLIHENQGQCCGLIDLMREYQNLKSAVSKVLENASSVIVTRTTIKDQEDLKWAFSKHETAKNKMNYKQKDLDNFTSKGKHLLSELKKIHSSDFSLVKTDMESTVDKWLDVSEKLEENMDRLRVSLSIWDDVLSTRDEIEGWSNNCVPQMAENISNLDNHLRAEELLKEFESEVKNKALRLEELHSKVNDLKELTKNLETPPDLQFIEADLMQKLEHAKEITEVAKGTLKDFTAQSTQVEKFINDITTWFTKVEESLMNCAQNETCEALKKVKDIQKELQSQQSNISSTQENLNSLCRKYHSAELESLGRAMTGLIKKHEAVSQLCSKTQASLQESLEKHFSESMQEFQEWFLGAKAAAKESSDRTGDSKVLEAKLHDLQNILDSVSDGQSKLDAVTQEGQTLYAHLSKQIVSSIQEQITKANEEFQAFLKQCLKDKQALQDCASELGSFEDQHRKLNLWIHEMEERFNTENLGESKQHIPEKKNEVHKVEMFLGELLAARESLDKLSQRGQLLSEEGHGAGQEGRLCSQLLTSHQNLLRMTKEKLRSCQVALQEHEALEEALQSMWFWVKAIQDRLACAESTLGSKDTLEKRLSQIQDILLMKGEGEVKLNMAIGKGEQALRSSNKEGQRVIQTQLETLKEVWADIMSSSVHAQSTLESVISQWNDYVERKNQLEQWMESVDQKIEHPLQPQPGLKEKFVLLDHLQSILSEAEDHTRALHRLIAKSRELYEKTEDESFKDTAQEELKTQFNDIMTVAKEKMRKVEEIVKDHLMYLDAVHEFTDWLHSAKEELHRWSDMSGDSSATQKKLSKIKELIDSREIGASRLSRVESLAPEVKQNTTASGCELMHTEMQALRADWKQWEDSVFQTQSCLENLVSQMALSEQEFSGQVAQLEQALEQFSALLKTWAQQLTLLEGKNTDEEIVECWHKGQEILDALQKAEPRTEDLKSQLNELCRFSRDLSTYSGKVSGLIKEYNCLCLQASKGCQNKEQILQQRFRKAFRDFQQWLVNAKITTAKCFDIPQNISEVSTSLQKIQEFLSESENGQHKLNMMLSKGELLSTLLTKEKAKGIQAKVTAAKEDWKNFHSNLHQKESALENLKIQMKDFEVSAEPIQDWLSKTEKMVHESSNRLYDLPAKRREQQKLQSVLEEIHCYEPQLNRLKEKAQQLWEGQAASKSFRHRVSQLSSQYLALSNLTKEKVSRLDRIVAEHNQFSLGIKELQDWMTDAIHMLDSYCHPTSDKSVLDSRTLKLEALLSVKQEKEIQMKMIVTRGESVLQNTSPEGIPTIQQQLQSVKDMWASLLSAGIRCKSQLEGALSKWTSYQDGVRQFSGWMDSMEANLNESERQHAELRDKTTMLGKAKLLNEEVLSYSSLLETIEVKGAGMTEHYVTQLELQDLQERYRAIQERAKEAVTKSEKLVRLHQEYQRDLKAFEVWLGQEQEKLDQYSVLEGDAHTHETTLRDLQELQVHCAEGQALLNSVLHTREDVIPSGIPQAEDRALESLRQDWQAYQHRLSETRTQFNNVVNKLRLMEQKFQQVDEWLKTAEEKVSPRTRRQSNRATKEIQLHQMKKWHEEVTAYRDEVEEVGARAQEILDESHVNSRMGCQATQLTSRYQALLLQVLEQIKFLEEEIQSLEESESSLSSYSDWYGSTHKNFKNVATKIDKVDTVMMGKKLKTLEVLLKDMEKGHSLLKSAREKGERAVKYLEEGEAERLRKEIHDHMEQLKELTSTVRKEHMTLEKGLHLAKEFSDKCKALTQWIAEYQEILHVPEEPKMELYEKKAQLSKYKSLQQTVLSHEPSVKSVREKGEALLELVQDVTLKDKIDQLQSDYQDLCSIGKEHVFSLEAKVKDHEDYNSELQEVEKWLLQMSGRLVAPDLLETSSLETITQQLAHHKAMMEEIAGFEDRLNNLQMKGDTLIGQCADHLQAKLKQNVHAHLQGTKDSYSAICSTAQRMYQSLEHELQKHVSRQDTLQQCQAWLSAVQPDLEPSPQPPLSRAEAIKQVKHFRALQEQARTYLDLLCSMCDLSNASVKTTAKDIQQTEQTIEQKLVQAQNLTQGWEEIKHLKSELWIYLQDADQQLQNMKRRHSELELNIAQNMVSQVKDFVKKLQSKQASVNTIIEKVNKLTKKEESPEHKEINHLNDQWLDLCRQSNNLCLQREEDLQRTRDYHDCMNVVEVFLEKFTTEWDNLARSDAESTAVHLEALKKLALALQERKYAIEDLKDQKQKMIEHLNLDDKELVKEQTSHLEQRWFQLEDLIKRKIQVSVTNLEELNVVQSRFQELMEWAEEQQPNIAEALKQSPPPDMAQNLLMDHLAICSELEAKQMLLKSLIKDADRVMADLGLNERQVIQKALSDAQSHVNCLSDLVGQRRKYLNKALSEKTQFLMAVFQATSQIQQHERKIMFREHICLLPDDVSKQVKTCKSAQASLKTYQNEVTGLWAQGRELMKEVTEQEKSEVLGKLQELQSVYDSVLQKCSHRLQELEKNLVSRKHFKEDFDKACHWLKQADIVTFPEINLMNESSELHTQLAKYQNILEQSPEYENLLLTLQRTGQTILPSLNEVDHSYLSEKLNALPRQFNVIVALAKDKFYKVQEAILARKEYASLIELTTQSLSELEAQFLRMSKVPTDLAVEEALSLQDGCRAILDEVAGLGEAVDELNQKKEGFRSTGQPWQPDKMLHLVTLYHRLKRQTEQRVSLLEDTTSAYQEHEKMCQQLERQLKSVKEEQSKVNEETLPAEEKLKMYHSLAGSLQDSGIVLKRVTIHLEDLAPHLDPLAYEKARHQIQSWQGELKLLTSAIGETVTECESRMVQSIDFQTEMSRSLDWLRRVKAELSGPVYLDLNLQDIQEEIRKIQIHQEEVQSSLRIMNALSHKEKEKFTKAKELISADLEHSLAELSELDGDIQEALRTRQATLTEIYSQCQRYYQVFQAANDWLEDAQELLQLAGNGLDVESAEENLKSHMEFFSTEDQFHSNLEELHSLVATLDPLIKPTGKEDLEQKVASLELRSQRMSRDSGAQVDLLQRCTAQWHDYQKAREEVIELMNDTEKKLSEFSLLKTSSSHEAEEKLSEHKALVSVVNSFHEKIVALEEKASQLEKTGNDASKATLSRSMTTVWQRWTRLRAVAQDQEKILEDAVDEWTGFNNKVKKATEMIDQLQDKLPGSSAEKASKAELLTLLEYHDTFVLELEQQQSALGMLRQQTLSMLQDGAAPTPGEEPPLMQEITAMQDRCLNMQEKVKTNGKLVKQELKDREMVETQINSVKCWVQETKEYLGNPTIEIDAQLEELQILLTEATNHRQNIEKMAEEQKEKYLGLYTILPSELSLQLAEVALDLKIRDQIQDKIKEVEQSKATSQELSRQIQKLAKDLTTILTKLKAKTDNVVQAKTDQKVLGEELDGCNSKLMELDAAVQKFLEQNGQLGKPLAKKIGKLTELHQQTIRQAENRLSKLNQAASHLEEYNEMLELILKWIEKAKVLAHGTIAWNSASQLREQYILHQTLLEESKEIDSELEAMTEKLQYLTSVYCTEKMSQQVAELGRETEELRQMIKIRLQNLQDAAKDMKKFEAELKKLQAALEQAQATLTSPEVGRLSLKEQLSHRQHLLSEMESLKPKVQAVQLCQSALRIPEDVVASLPLCHAALRLQEEASRLQHTAIQQCNIMQEAVVQYEQYEQEMKHLQQLIEGAHREIEDKPVATSNIQELQAQISRHEELAQKIKGYQEQIASLNSKCKMLTMKAKHATMLLTVTEVEGLAEGTEDLDGELLPTPSAHPSVVMMTAGRCHTLLSPVTEESGEEGTNSEISSPPACRSPSPVANTDASVNQDIAYYQALSAERLQTDAAKIHPSTSASQEFYEPGLEPSATAKLGDLQRSWETLKNVISEKQRTLYEALERQQKYQDSLQSISTKMEAIELKLSESPEPGRSPESQMAEHQALMDEILMLQDEINELQSSLAEELVSESCEADPAEQLALQSTLTVLAERMSTIRMKASGKRQLLEEKLNDQLEEQRQEQALQRYRCEADELDSWLLSTKATLDTALSPPKEPMDMEAQLMDCQNMLVEIEQKVVALSELSVHNENLLLEGKAHTKDEAEQLAGKLRRLKGSLLELQRALHDKQLNMQGTAQEKEESDVDLTATQSPGVQEWLAQARTTWTQQRQSSLQQQKELEQELAEQKSLLRSVASRGEEILIQHSAAETSGDAGEKPDVLSQELGMEGEKSSAEDQMRMKWESLHQEFSTKQKLLQNVLEQEQEQVLYSRPNRLLSGVPLYKGDVPTQDKSAVTSLLDGLNQAFEEVSSQSGGAKRQSIHLEQKLYDGVSATSTWLDDVEERLFVATALLPEETETCLFNQEILAKDIKEMSEEMDKNKNLFSQAFPENGDNRDVIEDTLGCLLGRLSLLDSVVNQRCHQMKERLQQILNFQNDLKVLFTSLADNKYIILQKLANVFEQPVAEQIEAIQQAEDGLKEFDAGIIELKRRGDKLQVEQPSMQELSKLQDMYDELMMIIGSRRSGLNQNLTLKSQYERALQDLADLLETGQEKMAGDQKIIVSSKEEIQQLLDKHKEYFQGLESHMILTETLFRKIISFAVQKETQFHTELMAQASAVLKRAHKRGVELEYILETWSHLDEDQQELSRQLEVVESSIPSVGLVEENEDRLIDRITLYQHLKSSLNEYQPKLYQVLDDGKRLLISISCSDLESQLNQLGECWLSNTNKMSKELHRLETILKHWTRYQSESADLIHWLQSAKDRLEFWTQQSVTVPQELEMVRDHLNAFLEFSKEVDAQSSLKSSVLSTGNQLLRLKKVDTATLRSELSRIDSQWTDLLTNIPAVQEKLHQLQMDKLPSRHAISEVMSWISLMENVIQKDEDNIKNSIGYKAIHEYLQKYKGFKIDINCKQLTVDFVNQSVLQISSQDVESKRSDKTDFAEQLGAMNKSWQILQGLVTEKIQLLEGLLESWSEYENNVQCLKTWFETQEKRLKQQHRIGDQASVQNALKDCQDLEDLIKAKEKEVEKIEQNGLALIQNKKEDVSSIVMSTLRELGQTWANLDHMVGQLKILLKSVLDQWSSHKVAFDKINSYLMEARYSLSRFRLLTGSLEAVQVQVDNLQNLQDDLEKQERSLQKFGSITNQLLKECHPPVTETLTNTLKEVNMRWNNLLEEIAEQLQSSKALLQLWQRYKDYSKQCASTVQQQEDRTNELLKAATNKDIADDEVATWIQDCNDLLKGLGTVKDSLFFLHELGEQLKQQVDASAASAIQSDQLSLSQHLCALEQALCKQQTSLQAGVLDYETFAKSLEALEAWIVEAEEILQGQDPSHSSDLSTIQERMEELKGQMLKFSSMAPDLDRLNELGYRLPLNDKEIKRMQNLNRHWSLISSQTTERFSKLQSFLLQHQTFLEKCETWMEFLVQTEQKLAVEISGNYQHLLEQQRAHELFQAEMFSRQQILHSIIIDGQRLLEQGQVDDRDEFNLKLTLLSNQWQGVIRRAQQRRGIIDSQIRQWQRYREMAEKLRKWLVEVSYLPMSGLGSVPIPLQQARTLFDEVQFKEKVFLRQQGSYILTVEAGKQLLLSADSGAEAALQAELAEIQEKWKSASMRLEEQKKKLAFLLKDWEKCEKGIADSLEKLRTFKKKLSQSLPDHHEELHAEQMRCKELENAVGSWTDDLTQLSLLKDTLSAYISADDISILNERVELLQRQWEELCHQLSLRRQQIGERLNEWAVFSEKNKELCEWLTQMESKVSQNGDILIEEMIEKLKKDYQEEIAIAQENKIQLQQMGERLAKASHESKASEIEYKLGKVNDRWQHLLDLIAARVKKLKETLVAVQQLDKNMSSLRTWLAHIESELAKPIVYDSCNSEEIQRKLNEQQELQRDIEKHSTGVASVLNLCEVLLHDCDACATDAECDSIQQATRNLDRRWRNICAMSMERRLKIEETWRLWQKFLDDYSRFEDWLKSSERTAAFPSSSGVIYTVAKEELKKFEAFQRQVHECLTQLELINKQYRRLARENRTDSACSLKQMVHEGNQRWDNLQKRVTSILRRLKHFIGQREEFETARDSILVWLTEMDLQLTNIEHFSECDVQAKIKQLKAFQQEISLNHNKIEQIIAQGEQLIEKSEPLDAAIIEEELDELRRYCQEVFGRVERYHKKLIRLPLPDDEHDLSDRELELEDSAALSDLHWHDRSADSLLSPQPSSNLSLSLAQPLRSERSGRDTPASVDSIPLEWDHDYDLSRDLESAMSRALPSEDEEGQDDKDFYLRGAVGLSGDHSALESQIRQLGKALDDSRFQIQQTENIIRSKTPTGPELDTSYKGYMKLLGECSSSIDSVKRLEHKLKEEEESLPGFVNLHSTETQTAGVIDRWELLQAQALSKELRMKQNLQKWQQFNSDLNSIWAWLGDTEEELEQLQRLELSTDIQTIELQIKKLKELQKAVDHRKAIILSINLCSPEFTQADSKESRDLQDRLSQMNGRWDRVCSLLEEWRGLLQDALMQCQGFHEMSHGLLLMLENIDRRKNEIVPIDSNLDAEILQDHHKQLMQIKHELLESQLRVASLQDMSCQLLVNAEGTDCLEAKEKVHVIGNRLKLLLKEVSRHIKELEKLLDVSSSQQDLSSWSSADELDTSGSVSPTSGRSTPNRQKTPRGKCSLSQPGPSVSSPHSRSTKGGSDSSLSEPGPGRSGRGFLFRVLRAALPLQLLLLLLIGLACLVPMSEEDYSCALSNNFARSFHPMLRYTNGPPPL

SEQ ID NO: 845 - protein, 1343 aa, Homo sapiens [sequence omitted]

SEQ ID NO: 846 - skipped

SEQ ID NO: 847 - protein, 474 aa, Homo sapiens
MAYIQLEPLNEGFLSRISGLLLCRWTCRHCCQKCYESSCCQSSEDEVEILGPFPAQTPPWLMASRSSDKDGDSVHTASEVPLTPRTNSPDGRRSSSDTSKSTYSLTRRISSLESRRPSSPLIDIKPIEFGVLSAKKEPIQPSVLRRTYNPDDYFRKFEPHLYSLDSNSDDVDSLTDEEILSKYQLGMLHFSTQYDLLHNHLTVRVIEARDLPPPISHDGSRQDMAHSNPYVKICLLPDQKNSKQTGVKRKTQKPVFEERYTFEIPFLEAQRRTLLLTVVDFDKFSRHCVIGKVSVPLCEVDLVKGGHWWKALIPSSQNEVELGELLLSLNYLPSAGRLNVDVIRAKQLLQTDVSQGSDPFVKIQLVHGLKLVKTKKTSFLRGTIDPFYNESFSFKVPQEELENASLVFTVFGHNMKSSNDFIGRIVIGQYSSGPSETNHWRRMLNTHRTAVEQWHSLRSRAECDRVSPASLEVT

SEQ ID NO: 848 - protein, 590 aa, Homo sapiens
MSGDYEDDLCRRALILVSDLCARVRDADTNDRCQEFNDRIRGYPRGPDADISVSLLSVIVTFCGIVLLGVSLFVSWKLCWVPWRDKGGSAVGGGPLRKDLGPGVGLAGLVGGGGHHLAAGLGGHPLLGGPHHHAHAAHHPPFAELLEPGSLGGSDTPEPSYLDMDSYPEAAAAAVAAGVKPSQTSPELPSEGGAGSGLLLLPPSGGGLPSAQSHQQVTSLAPTTRYPALPRPLTQQTLTSQPDPSSEERPPALPLPLPGGEEKAKLIGQIKPELYQGTGPGGRRSGGGPGSGEAGTGAPCGRISFALRYLYGSDQLVVRILQALDLPAKDSNGFSDPYVKIYLLPDRKKKFQTKVHRKTLNPVFNETFQFSVPLAELAQRKLHFSVYDFDRFSRHDLIGQVVLDNLLELAEQPPDRPLWRDIVEGGSEKADLGELNFSLCYLPTAGRLTVTIIKASNLKAMDLTGFSDPYVKASLISEGRRLKKRKTSIKKNTLNPTYNEALVFDVAPESVENVGLSIAVVDYDCIGHNEVIGVCRVGPDAADPHGREHWAEMLANPRKPVEHWHQLVEEKTVTSFTKGSKGLSEKENSE

SEQ ID NO: 849 - protein, 1893 aa, Homo sapiens
MGPGCDLLLRTAATITAAAIMSDTDSDEDSAGGGPFSLAGFLFGNINGAGQLEGESVLDDECKKHLAGLGALGLGSLITELTANEELTGTDGALVNDEGWVRSTEDAVDYSDINEVAEDESRRYQQTMGSLQPLCHSDYDEDDYDADCEDIDCKLMPPPPPPPGPMKKDKDQDSITGVSENGEGIILPSIIAPSSLASEKVDFSSSSDSESEMGPQEATQAESEDGKLTLPLAGIMQHDATKLLPSVTELFPEFRPGKVLRFLRLFGPGKNVPSVWRSARRKRKKKHRELIQEEQIQEVECSVESEVSQKSLWNYDYAPPPPPEQCLSDDEITMMAPVESKFSQSTGDIDKVTDTKPRVAEWRYGPARLWYDMLGVPEDGSGFDYGFKLRKTEHEPVIKSRMIEEFRKLEENNGTDLLADENFLMVTQLHWEDDIIWDGEDVKHKGTKPQRASLAGWLPSSMTRNAMAYNVQQGFAATLDDDKPWYSIFPIDNEDLVYGRWEDNIIWDAQAMPRLLEPPVLTLDPNDENLILEIPDEKEEATSNSPSKESKKESSLKKSRILLGKTGVIKEEPQQNMSQPEVKDPWNLSNDEYYYPKQQGLRGTFGGNIIQHSIPAVELRQPFFPTHMGPIKLRQFHRPPLKKYSFGALSQPGPHSVQPLLKHIKKKAKMREQERQASGGGEMFFMRTPQDLTGKDGDLILAEYSEENGPLMMQVGMATKIKNYYKRKPGKDPGAPDCKYGETVYCHTSPFLGSLHPGQLLQAFENNLFRAPIYLHKMPETDFLIIRTRQGYYIRELVDIFVVGQQCPLFEVPGPNSKRANTHIRDFLQVFIYRLFWKSKDRPRRIRMEDIKKAFPSHSESSIRKRLKLCADFKRTGMDSNWWVLKSDFRLPTEEEIRAMVSPEQCCAYYSMIAAEQRLKDAGYGEKSFFAPEEENEEDFQMKIDDEVRTAPWNTTRAFIAAMKGKCLLEVTGVADPTGCGEGFSYVKIPNKPTQQKDDKEPQPVKKTVTGTDADLRRLSLKNAKQLLRKFGVPEEEIKKLSRWEVIDVVRTMSTEQARSGEGPMSKFARGSRFSVAEHQERYKEECQRIFDLQNKVLSSTEVLSTDTDSSSAEDSDFEEMGKNIENMLQNKKTSSQLSREREEQERKELQRMLLAAGSAASGNNHRDDDTASVTSLNSSATGRCLKIYRTFRDEEGKEYVRCETVRKPAVIDAYVRIRTTKDEEFIRKFALFDEQHREEMRKERRRIQEQLRRLKRNQEKEKLKGPPEKKPKKMKERPDLKLKCGACGAIGHMRTNKFCPLYYQTNAPPSNPVAMTEEQEEELEKTVIHNDNEELIKVEGTKIVLGKQLIESADEVRRKSLVLKFPKQQLPPKKKRRVGTTVHCDYLNRPHKSIHRRRTDPMVTLSSILESIINDMRDLPNTYPFHTPVNAKVVKDYYKIITRPMDLQTLRENVRKRLYPSREEFREHLELIVKNSATYNGPKHSLTQISQSMLDLCDEKLKEKEDKLARLEKAINPLLDDDDQVAFSFILDNIVTQKMMAVPDSWPFHHPVNKKFVPDYYKVIVNPMDLETIRKNISKHKYQSRESFLDDVNLILANSVKYNGPESQYTKTAQEIVNVCYQTLTEYDEHLTQLEKDICTAKEAALEEAELESLDPMTPGPYTPQPPDLYDTNTSLSMSRDASVFQDESNMSVLDIPSATPEKQVTQEGEDGDGDLADEEEGTVQQPQASVLYEDLLMSEGEDDEEDAGSDEEGDNPFSAIQLSESGSDSDVGSGGIRPKQPRMLQENTRMDMENEESMMSYEGDGGEASHGLEDSNISYGSYEEPDPKSNTQDTSFSSIGGYEVSEEEEDEEEEEQRSGPSVLSQVHLSEDEEDSEDFHSIAGDSDLDSDE

SEQ ID NO: 850 - protein, 869 aa, Homo sapiens
MDFPSSLRPALFLTGPLGLSDVPDLSFMCSWRDALTLPEAQPQNSENGALHVTKDLLWEPATPGPLPMLPPLIDPWDPGLTARDLLFRGGYRYRKRPRVVLDVTEQISRFLLDHGDVAFAPLGKLMLENFKLEGAGSRTKKKTVVSVKKLLQDLGGHQPWGCPWAYLSNRQRRFSILGGPILGTSVASHLAELLHEELVLRWEQLLLDEACTGGALAWVPGRTPQFGQLVYPAGGAQDRLHFQEVVLTPGDNPQFLGKPGRIQLQGPVRQVVTCTVQGESKALIYTFLPHWLTCYLTPGPFHPSSALLAVRSDYHCAVWKFGKQWQPTLLQAMQVEKGATGISLSPHLPGELAICSRSGAVCLWSPEDGLRQIYRDPETLVFRDSSSWRWADFTAHPRVLTVGDRTGVKMLDTQGPPGCGLLLFRLGAEASCQKGERVLLTQYLGHSSPKCLPPTLHLVCTQFSLYLVDERLPLVPMLKWNHGLPSPLLLARLLPPPRPSCVQPLLLGGQGGQLQLLHLAGEGASVPRLAGPPQSLPSRIDSLPAFPLLEPKIQWRLQERLKAPTIGLAAVVPPLPSAPTPGLVLFQLSAAGDVFYQQLRPQVDSSLRRDAGPPGDTQPDCHAPTASWTSQDTAGCSQWLKALLKVPLAPPVWTAPTFTHRQMLGSTELRREEEEGQRLGVLRKAMARGQLLLQRDLGSLPAAEPPPAPESGLEDKLSERLGEAWAGRGAAWWERQQGRTSEPGRQTRRPKRRTQLSSSFSLSGHVDPSEDTSSPHSPEWPPADALPLPPTTPPSQELTPDACAQGVPSEQRQMLRDYMAKLPPQRDTPGCATTPPHSQASSVRATRSQQHTPVLSSSQPLRKKPRMGF

SEQ ID NO: 851 - protein, 1826 aa, Homo sapiens
MRPGCDLLLRAAATVTAAIMSDSDSEEDSSGGGPFTLAGILFGNISGAGQLEGESVLDDECKKHLAGLGALGLGSLITELTANEELTGTGGALVNDEGWIRSTEDAVDYSDINEVAEDESQRHQQTMGSLQPLYHSDYDEDDYDADCEDIDCKLMPPPPPPPGPMKKDKDQDAITCVSESGEDIILPSIIAPSFLASEKVDFSSYSDSESEMGPQEATQAESEDGKLTLPLAGIMQHDATKLLPSVTELFPEFRPGKVLRFLHLFGPGKNVPSVWRSARRKRKKHRELIQEEQIQEVECSVESEVSQKSLWNYDYAPPPPPEQCLADDEITMMVPVESKFSQSTGDVDKVTDTKPRVAEWRYGPARLWYDMLGVSEDGSGFDYGFKLRKTQHEPVIKSRMMEEFRKLEESNGTDLLADENFLMVTQLHWEDSIIWDGEDIKHKGTKPQGASLAGWLPSIKTRNVMAYNVQQGFAPTLDDDKPWYSIFPIDNEDLVYGRWEDNIIWDAQAMPRLLEPPVLALDPNDENLILEIPDEKEEATSNSPSKESKKESSLKKSRILLGKTGVIREEPQQNMSQPEVKDPWNLSNDEYYFPKQQGLRGTFGGNIIQHSIPAMELWQPFFPTHMGPIKIRQFHRPPLKKYSFGALSQPGPHSVQPLLKHIKKKAKMREQERQASGGGELFFMRTPQDLTGKDGDLILAEYSEENGPLMMQVGMATKIKNYYKRKPGKDPGAPDCKYGETVYCHTSPFLGSLHPGQLLQALENNLFRAPVYLHKMPETDFLIIRTRQGYYIRELVDIFVVGQQCPLFEVPGPNSRRANMHIRDFLQVFIYRLFWKSKDRPRRIRMEDIKKAFPSHSESSIRKRLKLCADFKRTGMDSNWWVLKSDFRLPTEEEIRAKVSPEQCCAYYSMIAAKQRLKDAGYGEKSFFAPEEENEEDFQMKIDDEVHAAPWNTTRAFIAAMKGKCLLEVTGVADPTGCGEGFSYVKIPNKPTQQKDDKEPQAVKKTVTGTDADLRRLSLKNAKQLLRKFGVPEEEIKKLSRWEVIDVVRTMSTEQAHSGEGPMSKFARGSRFSVAEHQERYKEECQRIFDLQNKVLSSTEVLSTDTDSISAEDSDFEEMGKNIENMLQNKKTSSQLSREWEEQERKELRRMLLVAGSAASGNNHRDDVTASMTSLKSSATGHCLKIYRTFRDEEGKEYVRCETVRKPAVIDAYVRIRTTKDEKFIQKFALFDEKHREEMRKERRRIQEQLRRLKRNQEKEKLKGPPEKKPKKMKERPDLKLKCGACGAIGHMRTNKFCPLYYQTNVPPSKPVAMTEEQEEELEKTVIHNDNEELIKVEGTKIVFGKQLIENVHEVRRKSLVLKFPKQQLPPKKKRRVGTTVHCDYLNIPHKSIHRRRTDPMVTLSSILESIINDMRDLPNTHPFHTPVNAKVVKDYYKIITRPMDLQTLRENVRKCLYPSREEFREHLELIVKNSATYNGPKHSLTQISQSMLDLCDEKLKEKEDKLARLEKAINPLLDDDDQVAFSFILDNIVTQKMMAVPDSWPFHHPVNKKFVPDYYKMIVNPVDLETIRKNISKHKYQSRESFLDDVNLILANSVKYNGPESQYTKTAQEIVNICYQTITEYDEHLTQLEKDICTAKEAALEEAELESLDPMTPGPYTSQPPDMYDTNTSLSTSRDASVFQDESNLSVLDISTATPEKQMCQGQGRLGEEDSDVDVEGYDDEEEDGKPKPPAPEGGDGDLADEEEGTVQQPEASVLYEDLLISEGEDDEEDAGSDEEGDNPFSAIQLSESGSDSDVGYGGIRPKQPFMLQHASGEHKDGHGK

SEQ ID NO: 852 - protein, 1990 aa, Homo sapiens
MFRNSLKMLLTGGKSSRKNRSSDGGSEEPPDRRQSSVDSRQSRSGQGGISTESDCAFEPDYAVPPLPVSEGDAEQELGPPPSVDEAANTLMTRLGFLLGEKVTEVQPGDQYSMEVQDENQTSAITQRISPCSTLTSSTASPPASSPCSTLPPISTNATAKDCSYGAVTSPTSTLESRDSGIIATLTSYSENVERTKYAGESSKELGSGGNIKPWQSQKSSMDSCLYRVDENMTASTYSLNKIPERNLETVLSQSVQSIPLYLMPRPNSVAATSSAHLEDLAYLDEQRHTPLRTSLRMPRQSMGGARTQQDLRVRFAPYRPPDISLKPLLFEVPSITTESVFVGRDWVFHEIDAQLQSSNASVNQGVVIVGNIGFGKTAIISRLVALSCHGTRMRQIASDSPHASPKHVDANRELPLTQPPSAHSSITSGSCPGTPEMRRRQEEAMRRLASQVVAYHYCQADNAYTCLVPEFVHNVAALLCRSPQLTAYREQLLREPHLQSMLSLRSCVQDPMASFRRGVLEPLENLHKERKIPDEDFIILIDGLNEAEFHKPDYGDTIVSFLSKMIGKFPSWLKLIVTVRTSLQEITKLLPFHRIFLDRLEENEAIDQDLQAYILHRIHSSSEIQNNISLNGKMDNTTFGKLSSHLKTLSQGSYLYLKLTFDLIEKGYLVLKSSSYKVVPVSLSEVYLLQCNMKFPTQSSFDRVMPLLNVAVASLHPLTDEHIFQAINAGSIEGTLEWEDFQQRMENLSMFLIKRRDMTRMFVHPSFREWLIWREEGEKTKFLCDPRSGHTLLAFWFSRQEGKLNRQQTIELGHHILKAHIFKGLSKKVGVSSSILQGLWISYSTEGLSMALASLRNLYTPNIKVSRLLILGGANINYRTEVLNNAPILCVQSHLGYTEMVALLLEFGANVDASSESGLTPLGYAAAAGYLSIVVLLCKKRAKVDHLDKNGQCALVHAALRGHLEVVKFLIQCDWTMAGQQQGVFKKSHAIQQALIAAASMGYTEIVSYLLDLPEKDEEEVERAQINSFDSLWGETALTAAAGRGKLEVCRLLLEQGAAVAQPNRRGAVPLFSTVRQGHWQIVDLLLTHGADVNMADKQGRTPLMMAASEGHLGTVDFLLAQGASIALMDKEGLTALSWACLKGHLSVVRSLVDNGAATDHADKNGRTPLDLAAFYGDAEVVQFLVDHGAMIEHVDYSGMRPLDRAVGCRNTSVVVTLLKKGAKIGPATWAMATSKPDIMIILLSKLMEEGDMFYKKGKVKEAAQRYQYALKKFPREGFGEDLKTFRELKVSLLLNLSRCRRKMNDFGMAEEFATKALELKPKSYEAYYARARAKRSSRQFAAALEDLNEAIKLCPNNREIQRLLLRVEEECRQMQQPQQPPPPPQPQQQLPEEAEPEPQHEDIYSVQDIFEEEYLEQDVENVSIGLQTEARPSQGLPVIQSPPSSPPHRDSAYISSSPLGSHQVFDFRSSSSVGSPTRQTYQSTSPALSPTHQNSHYRPSPPHTSPAHQGGSYRFSPPPVGGQGKEYPSPPPSPLRRGPQYRASPPAESMSVYRSQSGSPVRYQQETSVSQLPGRPKSPLSKMAQRPYQMPQLPVAVPQQGLRLQPAKAQIVRSNQPSPAVHSSTVIPTGAYGQVAHSMASKYQSSQGDIGVSQSRLVYQGSIGGIVGDGRPVQHVQASLSAGAICQHGGLTKEDLPQRPSSAYRGGVRYSQTPQIGRSQSASYYPVCHSKLDLERSSSQLGSPDVSHLIRRPISVNPNEIKPHPPTPRPLLHSQSVGLRFSPSSNSISSTSNLTPTFRPSSSIQQMEIPLKPAYERSCDELSPVSPTQGGYPSEPTRSRTTPFMGIIDKTARTQQYPHLHQQNRTWAVSSVDTVLSPTSPGNLPQPESFSPPSSISNIAFYNKTNNAQNGHLLEDDYYSPHGMLANGSRGDLLERVSQASSYPDVKVARTLPVAQAYQDNLYRQLSRDSRQGQTSPIKPKRPFVESNV

SEQ ID NO: 853 - protein, 1066 aa, Homo sapiens
MQSTDLGNKESGKIWHRKPSPATRDGIIVNIIHNTSDYHPKVLRFLNVAFDGTGDCLIAGDHQGNIYVFDLHGNRFNLVQRTAQACTALAFNLRRKSEFLVALADYSIKCFDTVTKELVSWMRGHESSVFSISVHASGKYAITTSSDTAQLWDLDTFQRKRKLNIRQSVGIQKVFFLPLSNTILSCFKDNSIFAWECDTLFCKYQLPAPPESSSILYKVFAVTRDGRILAAGGKSNHLHLWCLEARQLFRIIQMPTKVRAIRHLEFLPDSFDAGSNQVLGVLSQDGIMRFINMQTCKLLFEIGSLDEGISSSAISPHGRYIASIMENGSLNIYSVQALTQEINKPPPPLVKVIEDLPKNKLSSSDLKMKVTSGRVQQPAKSRESKMQTRILKQDLTGDFESKKNELPDGLNKKRLQILLKGYGEYPTKYRMFIWRSLLQLPENHTAFSTLIDKGTHVAFLNLQKKYPIKSRKLLRVLQRTLSALAHWSVIFSDTPYLPLLAFPFVKLFQNNQLICFEVIATLIINWCQHWFEYFPNPPINILSMIENVLAFHDKELLQHFIDHDITSQLYAWPLLETVFSEVLTREEWLKLFDNIFSNHPSFLLMTVVAYNICSRTPLLSCNLKDDFEFFFHHRNNLDINVVIRQVYHLMETTPTDIHPDSMLNVFVALTKGQYPVFNQYPKFIVDYQTQERERIRNDELDYLRERQTVEDMQAKVDQQRVEDEAWYQKQELLRKAEETRREMLLQEEEKMIQQRQRLAAVKRELKVKEMHLQDAARRRFLKLQQDQQEMELRRLDDEIGRKVYMRDREIAATARDLEMRQLELESQKRLYEKNLTENQEALAKEMRADADAYRRKVDLEEHMFHKLIEAGETQSQKTQKVIKENLAKAEQACLNTDWQIQSLHKQKCDDLQRNKCYQEVAKLLRENRRKEIEIINAMVEEEAKKWKEAEGKEFRLRSAKKASALSDASRKWFLKQEINAAVEHAENPCHKEEPRFQNEQDSSCLPRTSQLNDSSEMDPSTQISLNRRAVEWDTTGQNLIKKVRNLRQRLTARARHRCQTPHLLAA

SEQ ID NO: 854 - protein, 817 aa, Homo sapiens
MYHSLSETRHPLQPEEQEVGIDPLSSYSNKSGGDSNKNGRRTSSTLDSEGTFNSYRKEWEELFVNNNYLATIRQKGINGQLRSSRFRSICWKLFLCVLPQDKSQWISRIEELRAWYSNIKEIHITNPRKVVGQQDLMINNPLSQDEGSLWNKFFQDKELRSMIEQDVKRTFPEMQFFQQENVRKILTDVLFCYARENEQLLYKQGMHELLAPIVFVLHCDHQAFLHASESAQPSEEMKTVLNPEYLEHDAYAVFSQLMETAEPWFSTFEHDGQKGKETLMTPIPFARPQDLGPTIAIVTKVNQIQDHLLKKHDIELYMHLNRLEIAPQIYGLRWVRLLFGREFPLQDLLVVWDALFADGLSLGLVDYIFVAMLLYIRDALISSNYQTCLGLLMHYPFIGDVHSLILKALFLRDPKRNPRPVTYQFHPNLDYYKARGADLMNKSRTNAKGAPLNINKVSNSLINFGRKLISPAMAPGSAGGPVPGGNSSSSSSVVIPTRTSAEAPSHHLQQQQQQQRLMKSESMPVQLNKGDVVTGSDAQVSVPVQTLTDLQGLSSKNISSSPSVESLPGGREFTGSPPSSATKKDSFFSNISRSRSHSKTMGRKESEEELEAQISFLQGQLNDLDAMCKYCAKVMDTHLVNIQDVILQENLEKEDQILVSLAGLKQIKDILKGSLRFNQSQLEAEENEQITIADNHYCSSGQGQGRGQGQSVQMSGAIKQASSETPGCTDRGNSDDFILISKDDDGSSARGSFSGQAQPLRTLRSTSGKSQAPVCSPLVFSDPLMGPASASSSNPSSSPDDDSSKDSGFTIVSPLDI

SEQ ID NO: 855 - protein, 293 aa, Homo sapiens
MTEDSQRNFRSVYYEKVGFRGVEEKKSLEILLKDDRLDTEKLCTFSQRFPLPSMYRALVWKVLLGILPPHHESHAKVMMYRKEQYLDVLHALKVVRFVSDATPQAEVYLRMYQLESGKLPRSPSFPLEPDDEVFLAIAKAMEEMVEDSVDCYWITRRFVNQLNTKYRDSLPQLPKAFEQYLNLEDGRLLTHLRMCSAAPKLPYDLWFKRCFAGCLPESSLQRVWDKVVSGSCKILVFVAVEILLTFKIKVMALNSAEKITKFLENIPQDSSDAIVSKAIDLWHKHCGTPVHSS

SEQ ID NO: 856 - protein, 577 aa, Homo sapiens
MTELAGASSSCCHRPAGRGAMQSVLHHFQRLRGREGGSHFINTSSPRGEAKMSITSDEVNFLVYRYLQESGFSHSAFTFGIESHISQSNINGTLVPPAALISILQKGLQYVEAEISINEDGTVFDGRPIESLSLIDAVMPDVVQTRQQAFREKLAQQQASAAAAAAAATAAATAATTTSAGVSHQNPSKNREATVNGEENRAHSVNNHAKPMEIDGEVEIPSSKATVLRGHESEVFICAWNPVSDLLASGSGDSTARIWNLNENSNGGSTQLVLRHCIREGGHDVPSNKDVTSLDWNTNGTLLATGSYDGFARIWTEDGNLASTLGQHKGPIFALKWNRKGNYILSAGVDKTTIIWDAHTGEAKQQFPFHSAPALDVDWQNNTTFASCSTDMCIHVCRLGCDRPVKTFQGHTNEVNAIKWDPSGMLLASCSDDMTLKIWSMKQEVCIHDLQAHNKEIYTIKWSPTGPATSNPNSNIMLASASFDSTVRLWDIERGVCTHTLTKHQEPVYSVAFSPDGKYLASGSFDKCVHIWNTQSGNLVHSYRGTGGIFEVCWNARGDKVGASASDGSVCVLDLRK

SEQ ID NO: 857 - protein, 514 aa, Homo sapiens
MSISSDEVNFLVYRYLQESGFSHSAFTFGIESHISQSNINGALVPPAALISIIQKGLQYVEAEVSINEDGTLFDGRPIESLSLIDAVMPDVVQTRQQAYRDKLAQQQAAAAAAAAAAASQQGSAKNGENTANGEENGAHTIANNHTDMMEVDGDVEIPPNKAVVLRGHESEVFICAWNPVSDLLASGSGDSTARIWNLSENSTSGSTQLVLRHCIREGGQDVPSNKDVTSLDWNSEGTLLATGSYDGFARIWTKDGNLASTLGQHKGPIFALKWNKKGNFILSAGVDKTTIIWDAHTGEAKQQFPFHSAPALDVDWQSNNTFASCSTDMCIHVCKLGQDRPIKTFQGHTNEVNAIKWDPTGNLLASCSDDMTLKIWSMKQDNCVHDLQAHNKEIYTIKWSPTGPGTNNPNANLMLASASFDSTVRLWDVDRGICIHTLTKHQEPVYSVAFSPDGRYLASGSFDKCVHIWNTQTGALVHSYRGTGGIFEVCWNAAGDKVGASASDGSVCVLDLRK

SEQ ID NO: 858 - protein, 682 aa, Homo sapiens
MQLEHCLSPSIMLSKKFLNVSSSYPHSGGSELVLHDHPIISTTDNLERSSPLKKITRGMTNQSDTDNFPDSKDSPGDVQRSKLSPVLDGVSELRHSFDGSAADRYLLSQSSQPQSAATAPSAMFPYPGQHGPAHPAFSIGSPSRYMAHHPVITNGAYNSLLSNSSPQGYPTAGYPYPQQYGHSYQGAPFYQFSSTQPGLVPGKAQVYLCNRPLWLKFHRHQTEMIITKQGRRMFPFLSFNISGLDPTAHYNIFVDVILADPNHWRFQGGKWVPCGKADTNVQGNRVYMHPDSPNTGAHWMRQEISFGKLKLTNNKGASNNNGQMVVLQSLHKYQPRLHVVEVNEDGTEDTSQPGRVQTFTFPETQFIAVTAYQNTDITQLKIDHNPFAKGFRDNYDTIYTGCDMDRLTPSPNDSPRSQIVPGARYAMAGSFLQDQFVSNYAKARFHPGAGAGPGPGTDRSVPHTNGLLSPQQAEDPGAPSPQRWFVTPANNRLDFAASAYDTATDFAGNAATLLSYAAAGVKALPLQAAGCTGRPLGYYADPSGWGARSPPQYCGTKSGSVLPCWPNSAAAAARMAGANPYLGEEAEGLAAERSPLPPGAAEDAKPKDLSDSSWIETPSSIKSIDSSDSGIYEQAKRRRISPADTPVSESSSPLKSEVLAQRDCEKNCAKDISGYYGFYSHS

SEQ ID NO: 859 - protein, 495 aa, Homo sapiens
MHFSTVTRDMEAFTASSLSSLGAAGGFPGAASPGADPYGPREPPPPPPRYDPCAAAAPGAPGPPPPPHAYPFAPAAGAATSAAAEPEGPGASCAAAAKAPVKKNAKVAGVSVQLEMKALWDEFNQLGTEMIVTKAGRRMFPTFQVKLFGMDPMADYMLLMDFVPVDDKRYRYAFHSSSWLVAGKADPATPGRVHYHPDSPAKGAQWMKQIVSFDKLKLTNNLLDDNGHIILNSMHRYQPRFHVVYVDPRKDSEKYAEENFKTFVFEETRFTAVTAYQNHRITQLKIASNPFAKGFRDCDPEDWPRNHRPGALPLMSAFARSRNPVASPTQPSGTEKDAAEARREFQRDAGGPAVLGDPAHPPQLLARVLSPSLPGAGGAGGLVPLPGAPGGRPSPPNPELRLEAPGASEPLHHHPYKYPAAAYDHYLGAKSRPAPYPLPGLRGHGYHPHAHPHHHHHPVSPAAAAAAAAAAAAAAANMYSSAGAAPPGSYDYCPR

SEQ ID NO: 860 - protein, 1960 aa, Homo sapiens [sequence omitted]

SEQ ID NO: 861-867 - skipped (7 entries)

SEQ ID NO: 868 - protein, 773 aa, Homo sapiens
MFSKRLEKIPQVPLLFPFIFIILTNYSKMEGAVESQPSFFKTSQDIVTCTWVENCYSSFSRRPLEQMFCKHQSKNIISWTGMVAHTCNPSTLGGQGLCDFAKMHHQQRMAALGTDKELSDLLDFSAMFSPPVSSGKNGPTSLASGHFTGSNVEDRSSSGSWGNGGHPSPSRNYGDGTPYDHMTSRDLGSHDNLSPPFVNSRIQSKTERGSYSSYGRESNLQGCHQQSLLGGDMDMGNPGTLSPTKPGSQYYQYSSNNPRRRPLHSSAMEVQTKKVRKVPPGLPSSVYAPSASTADYNRDSPGYPSSKPATSTFPSSFFMQDGHHSSDPWSSSSGMNQPGYAGMLGNSSHIPQSSSYCSLHPHERLSYPSHSSADINSSLPPMSTFHRSGTNHYSTSSCTPPANGTDSIMANRGSGAAGSSQTGDALGKALASIYSPDHTNNSFSSNPSTPVGSPPSLSAGTAVWSRNGGQASSSPNYEGPLHSLQSRIEDRLERLDDAIHVLRNHAVGPSTAMPGGHGDMHGIIGPSHNGAMGGLGSGYGTGLLSANRHSLMVGTHREDGVALRGSHSLLPNQVPVPQLPVQSATSPDLNPPQDPYRGMPPGLQGQSVSSGSSEIKSDDEGDENLQDTKSSEDKKLDDDKKDIKSITRSRSSNNDDEDLTPEQKAEREKERRMANNARERLRVRDINEAFKELGRMVQLHLKSDKPQTKLLILHQAVAVILSLEQQVRERNLNPKAACLKRREEEKVSSEPPPLSLAGPHPGMGDASNHMGQM

SEQ ID NO: 869 - protein, 602 aa, Homo sapiens
MPQLNGGGGDDLGANDELISFKDEGEQEEKSSENSSAERDLADVKSSLVNESETNQNSSSDSEAERRPPPRSESFRDKSRESLEEAAKRQDGGLFKGPPYPGYPFIMIPDLTSPYLPNGSLSPTARTLHFQSGSTHYSAYKTIEHQIAVQYLQMKWPLLDVQAGSLQSRQALKDARSPSPAHIVSNKVPVVQHPHHVHPLTPLITYSNEHFTPGNPPPHLPADVDPKTGIPRPPHPPDISPYYPLSPGTVGQIPHPLGWLVPQQGQPVYPITTGGFRHPYPTALTVNASMSRFPPHMVPPHHTLHTTGIPHPAIVTPTVKQESSQSDVGSLHSSKHQDSKKEEEKKKPHIKKPLNAFMLYMKEMRAKVVAECTLKESAAINQILGRRWHALSREEQAKYYELARKERQLHMQLYPGWSARDNYGKKKKRKRDKQPGETNDANTPKKCRALFGLDRQTLWCKPCRRKKKCVRYIQGEGSCLSPPSSDGSLLDSPPPSPNLLGSPPRDAKSQTEQTQPLSLSLKPDPLAHLSMMPPPPALLLAEATHKASALCPNGALDLPPAALQPAAPSSSIAQPSTSSLHSHSSLAGTQPQPLSLVTKSLE

SEQ ID NO: 870 - protein, 406 aa, Homo sapiens
MSGCPFLGNNFGYTFKKLPVEGSEEDKSQTGVNRASKGGLIYGNYLHLEKVLNAQELQSETKGNKIHDEHLFIITHQAYELWFKQILWELDSVREIFQNGHVRDERNMLKVVSRMHRVSVILKLLVQQFSILETMTALDFNDFREYLSPASGFQSLQFRLLENKIGVLQNMRVPYNRRHYRDNFKGEENELLLKSEQEKTLLELVEAWLERTPGLEPHGFNFWGKLEKNITRGLEEEFIRIQAKEESEEKEEQVAEFQKQKEVLLSLFDEKRHEHLLSKGERRLSYRALQGALMIYFYREEPRFQVPFQLLTSLMDIDSLMTKWRYNHVCMVHRMLGSKAGTGGSSGYHYLRSTVSDRYKVFVDLFNLSTYLIPRHWIPKMNPTIHKFLYTAEYCDSSYFSSDESD

SEQ ID NO: 871 - skipped

SEQ ID NO: 872 - protein, 542 aa, Homo sapiens
MAAGAGTAGPASGPGVVRDPAASQPRKRPGREGGEGARRSDTMAGGGGSSDGSGRAAGRRASRSSGRARRGRHEPGLGGPAERGAGEARLEEAVNRWVLKFYFHEALRAFRGSRYGDFRQIRDIMQALLVRPLGKEHTVSRLLRVMQCLSRIEEGENLDCSFDMEAELTPLESAINVLEMIKTEFTLTEAVVESSRKLVKEAAVIICIKNKEFEKASKILKKHMSKDPTTQKLRNDLLNIIREKNLAHPVIQNFSYETFQQKMLRFLESHLDDAEPYLLTMAKKALKSESAASSTGKEDKQPAPGPVEKPPREPARQLRNPPTTIGMMTLKAAFKTLSGAQDSEAAFAKLDQKDLVLPTQALPASPALKNKRPRKDENESSAPADGEGGSELQPKNKRMTISRLVLEEDSQSTEPSAGLNSSQEAASAPPSKPTVLNQPLPGEKNPKVPKGKWNSSNGVEEKETWVEEDELFQVQAAPDEDSTTNITKKQKWTVEESEWVKAGVQKYGEGNWAAISKNYPFVNRTAVMIKDRWRTMKRLGMN

SEQ ID NO: 873 - protein, 1132 aa, Homo sapiens
MPRAPRCRAVRSLLRSHYREVLPLATFVRRLGPQGWRLVQRGDPAAFRALVAQCLVCVPWDARPPPAAPSFRQVSCLKELVARVLQRLCERGAKNVLAFGFALLDGARGGPPEAFTTSVRSYLPNTVTDALRGSGAWGLLLRRVGDDVLVHLLARCALFVLVAPSCAYQVCGPPLYQLGAATQARPPPHASGPRRRLGCERAWNHSVREAGVPLGLPAPGARRRGGSASRSLPLPKRPRRGAAPEPERTPVGQGSWAHPGRTRGPSDRGFCVVSPARPAEEATSLEGALSGTRHSHPSVGRQHHAGPPSTSRPPRPWDTPCPPVYAETKHFLYSSGDKEQLRPSFLLSSLRPSLTGARRLVETIFLGSRPWMPGTPRRLPRLPQRYWQMRPLFLELLGNHAQCPYGVLLKTHCPLRAAVTPAAGVCAREKPQGSVAAPEEEDTDPRRLVQLLRQHSSPWQVYGFVRACLRRLVPPGLWGSRHNERRFLRNTKKFISLGKHAKLSLQELTWKMSVRDCAWLRRSPGVGCVPAAEHRLREEILAKFLHWLMSVYVVELLRSFFYVTETTFQKNRLFFYRKSVWSKLQSIGIRQHLKRVQLRELSEAEVRQHREARPALLTSRLRFIPKPDGLRPIVNMDYVVGARTFRREKRAERLTSRVKALFSVLNYERARRPGLLGASVLGLDDIHRAWRTFVLRVRAQDPPPELYFVKVDVTGAYDTIPQDRLTEVIASIIKPQNTYCVRRYAVVQKAAHGHVRKAFKSHVSTLTDLQPYMRQFVAHLQETSPLRDAVVIEQSSSLNEASSGLFDVFLRFMCHHAVRIRGKSYVQCQGIPQGSILSTLLCSLCYGDMENKLFAGIRRDGLLLRLVDDFLLVTPHLTHAKTFLRTLVRGVPEYGCVVNLRKTVVNFPVEDEALGGTAFVQMPAHGLFPWCGLLLDTRTLEVQSDYSSYARTSIRASLTFNRGFKAGRNMRRKLFGVLRLKCHSLFLDLQVNSLQTVCTNIYKILLLQAYRFHACVLQLPFHQQVWKNPTFFLRVISDTASLCYSILKAKNAGMSLGAKGAAGPLPSEAVQWLCHQAFLLKLTRHRVTYVPLLGSLRTAQTQLSRKLPGTTLTALEAAANPALPSDFKTILD

SEQ ID NO: 874 - protein, 2002 aa, Homo sapiens
MEQDRTNHVEGNRLSPFLIPSPPICQTEPLATKLQNGSPLPERAHPEVNGDTKWHSFKSYYGIPCMKGSQNSRVSPDFTQESRGYSKCLQNGGIKRTVSEPSLSGLLQIKKLKQDQKANGERRNFGVSQERNPGESSQPNVSDLSDKKESVSSVAQENAVKDFTSFSTHNCSGPENPELQILNEQEGKSANYHDKNIVLLKNKAVLMPNGATVSASSVEHTHGELLEKTLSQYYPDCVSIAVQKTTSHINAINSQATNELSCEITHPSHTSGQINSAQTSNSELPPKPAAVVSEACDADDADNASKLAAMLNTCSFQKPEQLQQQKSVFEICPSPAENNIQGTTKLASGEEFCSGSSSNLQAPGGSSERYLKQNEMNGAYFKQSSVFTKDSFSATTTPPPPSQLLLSPPPPLPQVPQLPSEGKSTLNGGVLEEHHHYPNQSNTTLLREVKIEGKPEAPPSQSPNPSTHVCSPSPMLSERPQNNCVNRNDIQTAGTMTVPLCSEKTRPMSEHLKHNPPIFGSSGELQDNCQQLMRNKEQEILKGRDKEQTRDLVPPTQHYLKPGWIELKAPRFHQAESHLKRNEASLPSILQYQPNLSNQMTSKQYTGNSNMPGGLPRQAYTQKTTQLEHKSQMYQVEMNQGQSQGTVDQHLQFQKPSHQVHFSKTDHLPKAHVQSLCGTRFHFQQRADSQTEKLMSPVLKQHLNQQASETEPFSNSHLLQHKPHKQAAQTQPSQSSHLPQNQQQQQKLQIKNKEEILQTFPHPQSNNDQQREGSFFGQTKVEECFHGENQYSKSSEFETHNVQMGLEEVQNINRRNSPYSQTMKSSACKIQVSCSNNTHLVSENKEQTTHPELFAGNKTQNLHHMQYFPNNVIPKQDLLHRCFQEQEQKSQQASVLQGYKNRNQDMSGQQAAQLAQQRYLIHNHANVFPVPDQGGSHTQTPPQKDTQKHAALRWHLLQKQEQQQTQQPQTESCHSQMHRPIKVEPGCKPHACMHTAPPENKTWKKVTKQENPPASCDNVQQKSIIETMEQHLKQFHAKSLFDHKALTLKSQKQVKVEMSGPVTVLTRQTTAAELDSHTPALEQQTTSSEKTPTKRTAASVLNNFIESPSKLLDTPIKNLLDTPVKTQYDFPSCRCVEQIIEKDEGPFYTHLGAGPNVAAIREIMEERFGQKGKAIRIERVIYTGKEGKSSQGCPIAKWVVRRSSSEEKLLCLVRERAGHTCEAAVIVILILVWEGIPLSLADKLYSELTETLRKYGTLTNRRCALNEERTCACQGLDPETCGASFSFGCSWSMYYNGCKFARSKIPRKFKLLGDDPKEEEKLESHLQNLSTLMAPTYKKLAPDAYNNQIEYEHRAPECRLGLKEGRPFSGVTACLDFCAHAHRDLHNMQNGSTLVCTLTREDNREFGGKPEDEQLHVLPLYKVSDVDEFGSVEAQEEKKRSGAIQVLSSFRRKVRMLAEPVKTCRQRKLEAKKAAAEKLSSLENSSNKNEKEKSAPSRTKQTENASQAKQLAELLRLSGPVMQQSQQPQPLQKQPPQPQQQQRPQQQQPHHPQTESVNSYSASGSTNPYMRRPNPVSPYPNSSHTSDIYGSTSPMNFYSTSSQAAGSYLNSSNPMNPYPGLLNQNTQYPSYQCNGNLSVDNCSPYLGSYSPQSQPMDLYRYPSQDPLSKLSLPPIHTLYQPRFGNSQSFTSKYLGYGNQNMQGDGFSSCTIRPNVHHVGKLPPYPTHEMDGHFMGATSRLPPNLSNPNMDYKNGEHHSPSHIIHNYSAAPGMFNSSLHALHLQNKENDMLSHTANGLSKMLPALNHDRTACVQGGLHKLSDANGQEKQPLALVQGVASGAEDNDEVWSDSEQSFLDPDIGGVAVAPTHGSILIECAKRELHATTPLKNPNRNHPTRISLVFYQHKSMNEPKHGLALWEAKMAEKAREKEEECEKYGPDYVPQKSHGKKVKREPAEPHETSEPTYLRFIKSLAERTMSVTTDSTVTTSPYAFTRVTGPYNRYI

SEQ ID NO: 875 - protein, 693 aa, Homo sapiens
MAALGVQSINWQTAFNRQAHHTDKFSSQELILRRGQNFQVLMIMNKGLGSNERLEFIVSTGPYPSESAMTKAVFPLSNGSSGGWSAVLQASNGNTLTISISSPASAPIGRYTMALQIFSQGGISSVKLGTFILLFNPWLNVDSVFMGNHAEREEYVQEDAGIIFVGSTNRIGMIGWNFGQFEEDILSICLSILDRSLNFRRDAATDVASRNDPKYVGRVLSAMINSNDDNGVLAGNWSGTYTGGRDPRSWNGSVEILKNWKKSGFSPVRYGQCWVFAGTLNTALRSLGIPSRVITNFNSAHDTDRNLSVDVYYDPMGNPLDKGSDSVWNFHVWNEGWFVRSDLGPSYGGWQVLDATPQERSQGVFQCGPASVIGVREGDVQLNFDMPFIFAEVNADRITWLYDNTTGKQWKNSVNSHTIGRYISTKAVGSNARMDVTDKYKYPEGSDQERQVFQKALGKLKPNTPFAATSSMGLETEEQEPSIIGKLKVAGMLAVGKEVNLVLLLKNLSRDTKTVTVNMTAWTIIYNGTLVHEVWKDSATMSLDPEEEAEHPIKISYAQYEKYLKSDNMIRITAVCKVPDESEVVVERDIILDNPTLTLEVLNEARVRKPVNVQMLFSNPLDEPVRDCVLMVEGSGLLLGNLKIDVPTLGPKEGSRVRFDILPSRSGTKQLLADFSCNKFPAIKAMLSIDVAE

SEQ ID NO: 876 - protein, 528 aa, Homo sapiens
MPTPDATTPQAKGFRRAVSELDAKQAEAIMVRGQGAPGPSLTGSPWPGTAAPAASYTPTPRSPRFIGRRQSLIEDARKEREAAVAAAAAAVPSEPGDPLEAVAFEEKEGKAVLNLLFSPRATKPSALSRAVKVFETFEAKIHHLETRPAQRPRAGGPHLEYFVRLEVRRGDLAALLSGVRQVSEDVRSPAGPKVPWFPRKVSELDKCHHLVTKFDPDLDLDHPGFSDQVYRQRRKLIAEIAFQYRHGDPIPRVEYTAEEIATWKEVYTTLKGLYATHACGEHLEAFALLERFSGYREDNIPQLEDVSRFLKERTGFQLRPVAGLLSARDFLASLAFRVFQCTQYIRHASSPMHSPEPDCCHELLGHVPMLADRTFAQFSQDIGLASLGASDEEIEKLSTLYWFTVEFGLCKQNGEVKAYGAGLLSSYGELLHCLSEEPEIRAFDPEAAAVQPYQDQTYQSVYFVSESFSDAKDKLRSYASRIQRPFSVKFDPYTLAIDVLDSPQAVRRSLEGVQDELDTLAHALSAIG

SEQ ID NO: 877 - protein, 274 aa, Homo sapiens
MPKYCRAPNCSNTAGRLGADNRPVSFYKFPLKDGPRLQAWLQHMGCEHWVPSCHQHLCSEHFTPSCFQWRWGVRYLRPDAVPSIFSRGPPAKSQRRTRSTQKPVSPPPPLQKNTPLPQSPAIPVSGPVRLVVLGPTSGSPKTVATMLLTPLAPAPTPERSQPEVPAQQAQTGLGPVLGALQRRVRRLQRCQERHQAQLQALERLAQQLHGESLLARARRGLQRLTTAQTLGPEESQTFTIICGGPDIAMVLAQDPAPATVDAKPELLDTRIPSA

SEQ ID NO: 878 - protein, 1170 aa, Homo sapiens
MGLAWGLGVLFLMHVCGTNRIPESGGDNSVFDIFELTGAARKGSGRRLVKGPDPSSPAFRIEDANLIPPVPDDKFQDLVDAVRAEKGFLLLASLRQMKKTRGTLLALERKDHSGQVFSVVSNGKAGTLDLSLTVQGKQHVVSVEEALLATGQWKSITLFVQEDRAQLYIDCEKMENAELDVPIQSVFTRDLASIARLRIAKGGVNDNFQGVLQNVRFVFGTTPEDILRNKGCSSSTSVLLTLDNNVVNGSSPAIRTNYIGHKTKDLQAICGISCDELSSMVLELRGLRTIVTTLQDSIRKVTEENKELANELRRPPLCYHNGVQYRNNEEWTVDSCTECHCQNSVTICKKVSCPIMPCSNATVPDGECCPRCWPSDSADDGWSPWSEWTSCSTSCGNGIQQRGRSCDSLNNRCEGSSVQTRTCHIQECDKRFKQDGGWSHWSPWSSCSVTCGDGVITRIRLCNSPSPQMNGKPCEGEARETKACKKDACPINGGWGPWSPWDICSVTCGGGVQKRSRLCNNPTPQFGGKDCVGDVTENQICNKQDCPIDGCLSNPCFAGVKCTSYPDGSWKCGACPPGYSGNGIQCTDVDECKEVPDACFNHNGEHRCENTDPGYNCLPCPPRFTGSQPFGQGVEHATANKQVCKPRNPCTDGTHDCNKNAKCNYLGHYSDPMYRCECKPGYAGNGIICGEDTDLDGWPNENLVCVANATYHCKKDNCPNLPNSGQEDYDKDGIGDACDDDDDNDKIPDDRDNCPFHYNPAQYDYDRDDVGDRCDNCPYNHNPDQADTDNNGEGDACAADIDGDGILNERDNCQYVYNVDQRDTDMDGVGDQCDNCPLEHNPDQLDSDSDRIGDTCDNNQDIDEDGHQNNLDNCPYVPNANQADHDKDGKGDACDHDDDNDGIPDDKDNCRLVPNPDQKDSDGDGRGDACKDDFDHDSVPDIDDICPENVDISETDFRRFQMIPLDPKGTSQNDPNWVVRHQGKELVQTVNCDPGLAVGYDEFNAVDFSGTFFINTERDDDYAGFVFGYQSSSRFYVVMWKQVTQSYWDTNPTRAQGYSGLSVKVVNSTTGPGEHLRNALWHTGNTPGQVRTLWHDPRHIGWKDFTAYRWRLSHRPKTGFIRVVMYEGKKIMADSGPIYDKTYAGGRLGLFVFSQEMVFFSDLKYECRDP

SEQ ID NO: 879 - protein, 490 aa, Homo sapiens
MEQKPSKVECGSDPEENSARSPDGKRKRKNGQCSLKTSMSGYIPSYLDKDEQCVVCGDKATGYHYRCITCEGCKGFFRRTIQKNLHPTYSCKYDSCCVIDKITRNQCQLCRFKKCIAVGMAMDLVLDDSKRVAKRKLIEQNRERRRKEEMIRSLQQRPEPTPEEWDLIHIATEAHRSTNAQGSHWKQRRKFLPDDIGQSPIVSMPDGDKVDLEAFSEFTKIITPAITRVVDFAKKLPMFSELPCEDQIILLKGCCMEIMSLRAAVRYDPESDTLTLSGEMAVKREQLKNGGLGVVSDAIFELGKSLSAFNLDDTEVALLQAVLLMSTDRSGLLCVDKIEKSQEAYLLAFEHYVNHRKHNIPHFWPKLLMKEREVQSSILYKGAAAEGRPGGSLGVHPEGQQLLGMHVVQGPQVRQLEQQLGEAGSLQGPVLQHQSPKSPQQRLLELLHRSGILHARAVCGEDDSSEADSPSSSEEEPEVCEDLAGNAASP

SEQ ID NO: 880 - protein, 750 aa, Homo sapiens
MMEELHSLDPRRQELLEARFTGVGVSKGPLNSESSNQSLCSVGSLSDKEVETPEKKQNDQRNRKRKAEPYETSQGKGTPRGHKISDYFEFAGGSAPGTSPGRSVPPVARSSPQHSLSNPLPRRVEQPLYGLDGSAAKEATEEQSALPTLMSVMLAKPRLDTEQLAQRGAGLCFTFVSAQQNSPSSTGSGNTEHSCSSQKQISIQHRQTQSDLTIEKISALENSKNSDLEKKEGRIDDLLRANCDLRRQIDEQQKMLEKYKERLNRCVTMSKKLLIEKSKQEKMACRDKSMQDRLRLGHFTTVRHGASFTEQWTDGYAFQNLIKQQERINSQREEIERQRKMLAKRKPPAMGQAPPATNEQKQRKSKTNGAENETLTLAEYHEQEEIFKLRLGHLKKEEAEIQAELERLERVRNLHIRELKRIHNEDNSQFKDHPTLNDRYLLLHLLGRGGFSEVYKAFDLTEQRYVAVKIHQLNKNWRDEKKENYHKHACREYRIHKELDHPRIVKLYDYFSLDTDSFCTVLEYCEGNDLDFYLKQHKLMSEKEARSIIMQIVNALKYLNEIKPPIIHYDLKPGNILLVNGTACGEIKITDFGLSKIMDDDSYNSVDGMELTSQGAGTYWYLPPECFVVGKEPPKISNKVDVWSVGVIFYQCLYGRKPFGHNQSQQDILQENTILKATEVQFPPKPVVTPEAKAFIRRCLAYRKEDRIDVQQLACDPYLLPHIRKSVSTSSPAGAAIASTSGASNNSSSN

SEQ ID NO: 881 - protein, 229 aa, Homo sapiens
MTCCEGWTSCNGFSLLVLLLLGVVLNAIPLIVSLVEEDQFSQNPISCFEWWFPGIIGAGLMAIPATTMSLTARKRACCNNRTGMFLSSLFSVITVIGALYCMLISIQALLKGPLMCNSPSNSNANCEFSLKNISDIHPESFNLQWFFNDSCAPPTGFNKPTSNDTMASGWRASSFHFDSEENKHRLIHFSVFLGLLLVGILEVLFGLSQIVIGFLGCLCGVSKRRSQIV

SEQ ID NO: 882 - protein, 345 aa, Homo sapiens
MSSSLTRSSAVTARGSAPKPRCSCCWPLRSRTSRRCWWPSGATVSLPRPLCHEAPRARSARAGLPNRLPTALFNSGFWLKRSSYEEQPTVRFQHQVLLVALLGPESDGFLAWSTFPAFNRLQGDRLRVPLVSTREEDRNQDGKTDMLHFKLELPLQSTEHVLGVQLILTFSYRLHRMATLVMQSMAFLQSSFPVPGSQLYVNGDLRLQQKQPLSCGGLDARYNISVINGTSPFAYDYDLTHIVAAYQERNVTTVLNDPNPIWLVGRAADAPFVINAIIRYPVEVISYQPGFWEMVKFAWVQYVSILLIFLWVFERIKIFVFQNQVVTTIPVTVTPRGDLCKEHLS

SEQ ID NO: 883 - protein, 421 aa, Homo sapiens
MWYHRLSHLHSRLQDLLKGGVIYPALPQPNFKSLLPLAVHWHHTASKSLTCAWQQHEDHFELKYANTVMRFDYVWLRDHCRSASCYNSKTHQRSLDTASVDLCIKPKTIRLDETTLFFTWPDGHVTKYDLNWLVKNSYEGQKQKVIQPRILWNAEIYQQAQVPSVDCQSFLETNEGLKKFLQNFLLYGIAFVENVPPTQEHTEKLAERISLIRETIYGRMWYFTSDFSRGDTAYTKLALDRHTDTTYFQEPCGIQVFHCLKHEGTGGRTLLVDGFYAAEQVLQKAPEEFELLSKVPLKHEYIEDVGECHNHMIGIGPVLNIYPWNKELYLIRYNNYDRAVINTVPYDVVHRWYTAHRTLTIELRRPENEFWVKLKPGRVLFIDNWRVLHGRECFTGYRQLCGCYLTRDDVLNTARLLGLQA

SEQ ID NO: 884 - protein, 429 aa, Homo sapiens
MSRDPGSGGWEEAPRAAAALCTLYHEAGQRLRRLQDQLAARDALIARLRARLAALEGDAAPSLVDALLEQVARFREQLRRQEGGAAEAQMRQEIERLTERLEEKEREMQQLLSQPQHEREKEVVLLRRSMAEGERARAASDVLCRSLANETHQLRRTLTATAHMCQHLAKCLDERQHAQRNVGERSPDQSEHTDGHTSVQSVIEKLQEENRLLKQKVTHVEDLNAKWQRYNASRDEYVRGLHAQLRGLQIPHEPELMRKEISRLNRQLEEKINDCAEVKQELAASRTARDAALERVQMLEQQILAYKDDFMSERADRERAQSRIQELEEKVASLLHQVSWRQDSREPDAGRIHAGSKTAKYLAADALELMVPGGWRPGTGSQQPEPPAEGGHPGAAQRGQGDLQCPHCLQCFSDEQGEELLRHVAECCQ

SEQ ID NO: 885 - protein, 1299 aa, Homo sapiens
MSLQEMFRFPMGLLLGSVLLVASAPATLEPPGCSNKEQQVTVSHTYKIDVPKSALVQVDADPQPLSDDGASLLALGEAREEQNIIFRHNIRLQTPQKDCELAGSVQDLLARVKKLEEEMVEMKEQCSAQRCCQGVTDLSRHCSGHGTFSLETCSCHCEEGREGPACERLACPGACSGHGRCVDGRCLCHEPYVGADCGYPACPENCSGHGECVRGVCQCHEDFMSEDCSEKRCPGDCSGHGFCDTGECYCEEGFTGLDCAQVVTPQGLQLLKNTEDSLLVSWEPSSQVDHYLLSYYPLGKELSGKQIQVPKEQHSYEILGLLPGTKYIVTLRNVKNEVSSSPQHLLATTDLAVLGTAWVTDETENSLDVEWENPSTEVDYYKLRYGPMTGQEVAEVTVPKSSDPKSRYDITGLHPGTEYKITVVPMRGELEGKPILLNGRTEIDSPTNVVTDRVTEDTATVSWDPVQAVIDKYVVRYTSADGDTKEMAVHKDESSTVLTGLKPGEAYKVYVWAERGNQGSKKADTNALTEIDSPANLVTDRVTENTATISWDPVQATIDKYVVRYTSADDQETREVLVGKEQSSTVLTGLRPGVEYTVHVWAQKGDRESKKADTNAPTDIDSPKNLVTDRVTENMATVSWDPVQAAIDKYVVRYTSAGGETREVPVGKEQSSTVLTGLRPGMEYMVHVWAQKGDQESKKADTKAQTDIDSPQNLVTDRVTENMATVSWDPVRATIDRYVVRYTSAKDGETREVPVGKEQSSTVLTGLRPGVEYTVHVWAQKGAQESKKADTKAQTDIDSPQNLVTDWVTENTATVSWDPVQATIDRYVVHYTSANGETREVPVGKEQSSTVLTGLRPGMEYTVHVWAQKGNQESKKADTKAQTEIDGPKNLVTDWVTENMATVSWDPVQATIDKYMVRYTSADGETREVPVGKEHSSTVLTGLRPGMEYMVHVWAQKGAQESKKADTKAQTELDPPRNLRPSAVTQSGGILTWTPPSAQIHGYILTYQFPDGTVKEMQLGREDQRFALQGLEQGATYPVSLVAFKGGRRSRNVSTTLSTVGARFPHPSDCSQVQQNSNAASGLYTIYLHGDASRPLQVYCDMETDGGGWIVFQRRNTGQLDFFKRWRSYVEGFGDPMKEFWLGLDKLHNLTTGTPARYEVRVDLQTANESAYAIYDFFQVASSKERYKLTVGKYRGTAGDALTYHNGWKFTTFDRDNDIALSNCALTHHGGWWYKNCHLANPNGRYGETKHSEGVNWEPWKGHEFSIPYVELKIRPHGYSREPVLGRKKRTLRGRLRTF

SEQ ID NO: 886 - protein, 1833 aa, Homo sapiens
MREKEQEREEQLMEDKKRKKEDKKKKEATQKVTEQKTKVPEVTKPSLSQPTAASPIGSSPSPPVNGGNNAKRVAVPNGQPPSAARYMPREVPPRFRCQQDHKVLLKRGQPPPPSCMLLGGGAGPPPCTAPGANPNNAQVTGALLQSESGTAPDSTLGGAAASNYANSTWGSGASSNNGTSPNPIHIWDKVIVDGSDMEEWPCIASKDTESSSENTTDNNSASNPGSEKSTLPGSTTSNKGKGSQCQSASSGNECNLGVWKSDPKAKSVQSSNSTTENNNGLGNWRNVSGQDRIGPGSGFSNFNPNSNPSAWPALVQEGTSRKGALETDNSNSSAQVSTVGQTSREQQSKMENAGVNFVVSGREQAQIHNTDGPKNGNTNSLNLSSPNPMENKGMPFGMGLGNTSRSTDAPSQSTGDRKTGSVGSWGAARGPSGTDTVSGQSNSGNNGNNGKEREDSWKGASVQKSTGSKNDSWDNNNRSTGGSWNFGPQDSNDNKWGEGNKMTSGVSQGEWKQPTGSDELKIGEWSGPNQPNSSTGAWDNQKGHPLPENQGNAQAPCWGRSSSSTGSEVGGQSTGSNHKAGSSDSHNSGRRSYRPTHPDCQAVLQTLLSRTDLDPRVLSNTGWGQTQIKQDTVWDIEEVPRPEGKSDKGTEGWESAATQTKNSGGWGDAPSQSNQMKSGWGELSASTEWKDPKNTGGWNDYKNNNSSNWGGGRPDEKTPSSWNENPSKDQGWGGGRQPNQGWSSGKNGWGEEVDQTKNSNWESSASKPVSGWGEGGQNEIGTWGNGGNASLASKGGWEDCKRSPAWNETGRQPNSWNKQHQQQQPPQQPPPPQPEASGSWGGPPPPPPGNVRPSNSSWSSGPQPATPKDEEPSGWEEPSPQSISRKMDIDDGTSAWGDPNSYNYKNVNLWDKNSQGGPAPREPNLPTPMTSKSASVWSKSTPPAPDNGTSAWGEPNESSPGWGEMDDTGASTTGWGNTPANAPNAMKPNSKSMQDGWGESDGPVTGARHPSWEEEEDGGVWNTTGSQGSASSHNSASWGQGGKKQMKCSLKGGNNDSWMNPLAKQFSNMGLLSQTEDNPSSKMDLSVGSLSDKKFDVDKRAMNLGDFNDIMRKDRSGFRPPNSKDMGTTDSGPYFEKLTLPFSNQDGCLGDEAPCSPFSPSPSYKLSPSGSTLPNVSLGAIGTGLNPQNFAARQGGSHGLFGNSTAQSRGLHTPVQPLNSSPSLRAQVPPQFISPQVSASMLKQFPNSGLSPGLFNVGPQLSPQQIAMLSQLPQIPQFQLACQLLLQQQQQQQLLQNQRKISQAVRQQQEQQLARMVSALQQQQQQQQRQPGMKHSPSHPVGPKPHLDNMVPNALNVGLPDLQTKGPIPGYGSGFSSGGMDYGMVGGKEAGTESRFKQWTSMMEGLPSVATQEANMHKNGAIVAPGKTRGGSPYNQFDIIPGDTLGGHTGPAGDSWLPAKSPPTNKIGSKSSNASWPPEFQPGVPWKGIQNIDPESDPYVTPGSVLGGTATSPIVDTDHQLLRDNTTGSNSSLNTSLPSPGAWPYSASDNSFTNVHSTSAKFPDYKSTWSPDPIGHNPTHLSNKMWKNHISSRNTTPLPRPPPGLTNPKPSSPWSSTAPRSVRGWGTQDSRLASASTWSDGGSVRPSYWLVLHNLTPQIDGSTLRTICMQHGPLLTFHLNLTQGTALIRYSTKQEAAKAQTALHMCVLGNTTILAEFATDDEVSRFLAQAQPPTPAATPSAPAAGWQSLETGQNQSDPVGPALNLFGGSTGLGQWSSSAGGSSGADLAGASLWGPPNYSSSLWGVPTVEDPHRMGSPAPLLPGDLLGGGSDSI

SEQ ID NO: 887 - protein, 145 aa, Homo sapiens
MVGRNSAIAAGVCGALFIGYCIYFDRKRRSDPNFKNRLRERRKKQKLAKERAGLSKLPDLKDAEAVQKFFLEEIQLGEELLAQGEYEKGVDHLTNAIAVCGQPQQLLQVLQQTLPPPVFQMLLTKLPTISQRIVSAQSLAEDDVE

SEQ ID NO: 888 - protein, 765 aa, Homo sapiens
MSGDHLHNDSQIEADFRLNDSHKHKDKHKDREHRHKEHKKEKDREKSKHSNSEHKDSEKKHKEKEKTKHKDGSSEKHKDKHKDRDKEKRKEEKVRASGDAKIKKEKENGFSSPPQIKDEPEDDGYFVPPKEDIKPLKRPRDEDDADYKPKKIKTEDTKKEKKRKLEEEEDGKLKKPKNKDKDKKVPEPDNKKKKPKKEEEQKWKWWEEERYPEGIKWKFLEHKGPVFAPPYEPLPENVKFYYDGKVMKLSPKAEEVATFFAKMLDHEYTTKEIFRKNFFKDWRKEMTNEEKNIITNLSKCDFTQMSQYFKAQTEARKQMSKEEKLKIKEENEKLLKEYGFCIMDNHKERIANFKIEPPGLFRGRGNHPKMGMLKRRIMPEDIIINCSKDAKVPSPPPGHKWKEVRHDNKVTWLVSWTENIQGSIKYIMLNPSSRIKGEKDWQKYETARRLKKCVDKIRNQYREDWKSKEMKVRQRAVALYFIDKLALRAGNEKEEGETADTVGCCSLRVEHINLHPELDGQEYVVEFDFLGKDSIRYYNKVPVEKRVFKNLQLFMENKQPEDDLFDRLNTGILNKHLQDLMEGLTAKVFRTYNASITLQQQLKELTAPDENIPAKILSYNRANRAVAILCNHQRAPPKTFEKSMMNLQTKIDAKKEQLADARRDLKSAKADAKVMKDAKTKKVVESKKKAVQRLEEQLMKLEVQATDREENKQIALGTSKLNYLDPRITVAWCKKWGVPIEKIYNKTQREKFAWAIDMADEDYEF

SEQ ID NO: 889 - protein, 862 aa, Homo sapiens
MKTVLMVAEKPSLAQSIAKILSRGSLSSHKGLNGACSVHEYTGTFAGQPVRFKMTSVCGHVMTLDFLGKYNKWDKVDPAELFSQAPTEKKEANPKLNMVKFLQVEGRGCDYIVLWLDCDKEGENICFEVLDAVLPVMNKAHGGEKTVFRARFSSITDTDICNAMACLGEPDHNEALSVDARQELDLRIGCAFTRFQTKYFQGKYGDLDSSLISFGPCQTPTLGFCVERHDKIQSFKPETYWVLQAKVNTDKDRSLLLDWDRVRVFDREIAQMFLNMTKLEKEAQVEATSRKEKAKQRPLALNTVEMLRVASSSLGMGPQHAMQTAERLYTQGYISYPRTETTHYPENFDLKGSLRQQANHPYWADTVKRLLAEGINRPRKGHDAGDHPPITPMKSATEAELGGDAWRLYEYITRHFIATVSHDCKYLQSTISFRIGPELFTCSGKTVLSPGFTEVMPWQSVPLEESLPTCQRGDAFPVGEVKMLEKQTNPPDYLTEAELITLMEKHGIGTDASIPVHINNICQRNYVTVESGRRLKPTNLGIVLVHGYYKIDAELVLPTIRSAVEKQLNLIAQGKADYRQVLGHTLDVFKRKFHYFVDSIAGMDELMEVSFSPLAATGKPLSRCGKCHRFMKYIQAKPSRLHCSHCDETYTLPQNGTIKLYKELRCPLDDFELVLWSSGSRGKSYPLCPYCYNHPPFRDMKKGMGCNECTHPSCQHSLSMLGIGQCVECESGVLVLDPTSGPKWKVACNKCNVVAHCFENAHRVRVSADTCSVCEAALLDVDFNKAKSPLPGDETQHMGCVFCDPVFQELVELKHAASCHPMHRGGPGRRQGRGRGRARRPPGKPNPRRPKDKMSALAAYFV

SEQ ID NO: 890 - protein, 490 aa, Homo sapiens
MQPAMMMFSSKYWARRGFSLDSAVPEEHQLLGSSTLNKPNSGKNDDKGNKGSSKREAATESGKTAVVFSLKNEVGGLVKALRLFQEKRVNMVHIESRKSRRRSSEVEIFVDCECGKTEFNELIQLLKFQTTIVTLNPPENIWTEEEELEDVPWFPRKISELDKCSHRVLMYGSELDADHPGFKDNVYRQRRKYFVDVAMGYKYGQPIPRVEYTEEETKTWGVVFRELSKLYPTHACREYLKNFPLLTKYCGYREDNVPQLEDVSMFLKERSGFTVRPVAGYLSPRDFLAGLAYRVFHCTQYIRHGSDPLYTPEPDTCHELLGHVPLLADPKFAQFSQEIGLASLGASDEDVQKLATCYFFTIEFGLCKQEGQLRAYGAGLLSSIGELKHALSDKACVKAFDPKTTCLQECLITTFQEAYFVSESFEEAKEKMRDFAKSITRPFSVYFNPYTQSIEILKDTRSIENVVQDLRSDLNTVCDALNKMNQYLGI

SEQ ID NO: 891 - protein, 933 aa, Homo sapiens
MRALAVLSVTLVMACTEAFFPFISRGKELLWGKPEESRVSSVLEESKRLVDTAMYATMQRNLKKRGILSPAQLLSFSKLPEPTSGVIARAAEIMETSIQAMKRKVNLKTQQSQHPTDALSEDLLSIIANMSGCLPYMLPPKCPNTCLANKYRPITGACNNRDHPRWGASNTALARWLPPVYEDGFSQPRGWNPGFLYNGFPLPPVREVTRHVIQVSNEVVTDDDRYSDLLMAWGQYIDHDIAFTPQSTSKAAFGGGADCQMTCENQNPCFPIQLPEEARPAAGTACLPFYRSSAACGTGDQGALFGNLSTANPRQQMNGLTSFLDASTVYGSSPALERQLRNWTSAEGLLRVHARLRDSGRAYLPFVPPRAPAACAPEPGIPGETRGPCFLAGDGRASEVPSLTALHTLWLREHNRLAAALKALNAHWSADAVYQEARKVVGALHQIITLRDYIPRILGPEAFQQYVGPYEGYDSTANPTVSNVFSTAAFRFGHATIHPLVRRLDASFQEHPDLPGLWLHQAFFSPWTLLRGGGLDPLIRGLLARPAKLQVQDQLMNEELTERLFVLSNSSTLDLASINLQRGRDHGLPGYNEWREFCGLPRLETPADLSTAIASRSVADKILDLYKHPDNIDVWLGGLAENFLPRARTGPLFACLIGKQMKALRDGDWFWWENSHVFTDAQRRELEKHSLSRVICDNTGLTRVPMDAFQVGKFPEDFESCDSITGMNLEAWRETFPQDDKCGFPESVENGDFVHCEESGRRVLVYSCRHGYELQGREQLTCTQEGWDFQPPLCKDVNECADGAHPPCHASARCRNTKGGFQCLCADPYELGDDGRTCVDSGRLPRVTWISMSLAALLIGGFAGLTSTVICRWTRTGTKSTLPISETGGGTPELRCGKHQAVGTSPQRAAAQDSEQESAGMEGRDTHRLPRAL

SEQ ID NO: 892 - skipped

SEQ ID NO: 893 - protein, 1127 aa, Homo sapiens
MAENKGGGEAESGGGGSGSAPVTAGAAGPAAQEAEPPLTAVLVEEEEEEGGRAGAEGGAAGPDDGGVAAASSGSAQAASSPAASVGTGVAGGAVSTPAPAPASAPAPGPSAGPPPGPPASLLDTCAVCQQSLQSRREAEPKLLPCLHSFCLRCLPEPERQLSVPIPGGSNGDIQQVGVIRCPVCRQECRQIDLVDNYFVKDTSEAPSSSDEKSEQVCTSCEDNASAVGFCVECGEWLCKTCIEAHQRVKFTKDHLIRKKEDVSESVGASGQRPVFCPVHKQEQLKLFCETCDRLTCRDCQLLEHKEHRYQFLEEAFQNQKGAIENLLAKLLEKKNYVHFAATQVQNRIKEVNETNKRVEQEIKVAIFTLINEINKKGKSLLQQLENVTKERQMKLLQQQNDITGLSRQVKHVMNFTNWAIASGSSTALLYSKRLITFQLRHILKARCDPVPAANGAIRFHCDPTFWAKNVVNLGNLVIESKPAPGYTPNVVVGQVPPGTNHISKTPGQINLAQLRLQHMQQQVYAQKHQQLQQMRMQQPPAPVPTTTTTTQQHPRQAAPQMLQQQPPRLISVQTMQRGNMNCGAFQAHQMRLAQNAARIPGIPRHSGPQYSMMQPHLQRQHSNPGHAGPFPVVSVHNTTINPTSPTTATMANANRGPTSPSVTAIELIPSVTNPENLPSLPDIPPIQLEDAGSSSLDNLLSRYISGSHLPPQPTSTMNPSPGPSALSPGSSGLSNSHTPVRPPSTSSTGSRGSCGSSGRTAEKTSLSFKSDQVKVKQEPGTEDEICSFSGGVKQEKTEDGRRSACMLSSPESSLTPPLSTNLHLESELDALASLENHVKIEPADMNESCKQSGLSSLVNGKSPIRSLMHRSARIGGDGNNKDDDPNEDWCAVCQNGGDLLCCEKCPKVFHLTCHVPTLLSFPSGDWICTFCRDIGKPEVEYDCDNLQHSKKGKTAQGLSPVDQRKCERLLLYLYCHELSIEFQEPVPASIPNYYKIIKKPMDLSTVKKKLQKKHSQHYQIPDDFVADVRLIFKNCERFNEMMKVVQVYADTQEINLKADSEVAQAGKAVALYFEDKLTEIYSDRTFAPLPEFEQEEDDGEVTEDSDEDFIQPRRKRLKSDERPVHIK

SEQ ID NO: 894 - protein, 3097 aa, Homo sapiens
MSGSSGGAAAPAASSGPAAAASAAGSGCGGGAGEGAEEAAKDLADIAAFFRSGFRKNDEMKAMDVLPILKEKVAYLSGGRDKRGGPILTFPARSNHDRIRQEDLRRLISYLACIPSEEVCKRGFTVIVDMRGSKWDSIKPLLKILQESFPCCIHVALIIKPDNFWQKQRTNFGSSKFEFETNMVSLEGLTKVVDPSQLTPEFDGCLEYNHEEWIEIRVAFEDYISNATHMLSRLEELQDILAKKELPQDLEGARNMIEEHSQLKKKVIKAPIEDLDLEGQKLLQRIQSSESFPKKNSGSGNADLQNLLPKVSTMLDRLHSTRQHLHQMWHVRKLKLDQCFQLRLFEQDAEKMFDWITHNKGLFLNSYTEIGTSHPHAMELQTQHNHFAMNCMNVYVNINRIMSVANRLVESGHYASQQIRQIASQLEQEWKAFAAALDERSTLLDMSSIFHQKAEKYMSNVDSWCKACGEVDLPSELQDLEDAIHHHQGIYEHITLAYSEVSQDGKSLLDKLQRPLTPGSSDSLTASANYSKAVHHVLDVIHEVLHHQRQLENIWQHRKVRLHQRLQLCVFQQDVQQVLDWIENHGEAFLSKHTGVGKSLHRARALQKRHEDFEEVAQNTYTNADKLLEAAEQLAQTGECDPEEIYQAAHQLEDRIQDFVRRVEQRKILLDMSVSFHTHVKELWTWLEELQKELLDDVYAESVEAVQDLIKRFGQQQQTTLQVTVNVIKEGEDLIQQLRDSAISSNKTPHNSSINHIETVLQQLDEAQSQMEELFQERKIKLELFLQLRIFERDAIDIISDLESWNDELSQQMNDFDTEDLTIAEQRLQHHADKALTMNNLTFDVIHQGQDLLQYVNEVQASGVELLCDRDVDMATRVQDLLEFLHEKQQELDLAAEQHRKHLEQCVQLRHLQAEVKQVLGWIRNGESMLNAGLITASSLQEAEQLQREHEQFQHAIEKTHQSALQVQQKAEAMLQANHYDMDMIRDCAEKVASHWQQLMLKMEDRLKLVNASVAFYKTSEQVCSVLESLEQEYKREEDWCGGADKLGPNSETDHVTPMISKHLEQKEAFLKACTLARRNADVFLKYLHRNSVNMPGMVTHIKAPEQQVKNILNELFQRENRVLHYWTMRKRRLDQCQQYVVFERSAKQALEWIHDNGEFYLSTHTSTGSSIQHTQELLKEHEEFQITAKQTKERVKLLIQLADGFCEKGHAHAAEIKKCVTAVDKRYRDFSLRMEKYRTSLEKALGISSDSNKSSKSLQLDIIPASIPGSEVKLRDAAHELNEEKRKSARRKEFIMAELIQTEKAYVRDLRECMDTYLWEMTSGVEEIPPGIVNKELIIFGNMQEIYEFHNNIFLKELEKYEQLPEDVGHCFVTWADKFQMYVTYCKNKPDSTQLILEHAGSYFDEIQQRHGLANSISSYLIKPVQRITKYQLLLKELLTCCEEGKGEIKDGLEVMLSVPKRANDAMHLSMLEGFDENIESQGELILQESFQVWDPKTLIRKGRERHLFLFEMSLVFSKEVKDSSGRSKYLYKSKLFTSELGVTEHVEGDPCKFALWVGRTPTSDNKIVLKASSIENKQDWIKHIREVIQERTIHLKGALKEPIHIPKTAPATRQKGRRDGEDLDSQGDGSSQPDTISIASRTSQNTLDSDKLSGGCELTVVIHDFTACNSNELTIRRGQTVEVLERPHDKPDWCLVRTTDRSPAAEGLVPCGSLCIAHSRSSMEMEGIFNHKDSLSVSSNDASPPASVASLQPHMIGAQSSPGPKRPGNTLRKWLTSPVRRLSSGKADGHVKKLAHKHKKSREVRKSADAGSQKDSDDSAATPQDETVEERGRNEGLSSGTLSKSSSSGMQSCGEEEGEEGADAVPLPPPMAIQQHSLLQPDSQDDKASSRLLVRPTSSETPSAAELVSAIEELVKSKMALEDRPSSLLVDQGDSSSPSFNPSDNSLLSSSSPIDEMEERKSSSLKRRHYVLQELVETERDYVRDLGYVVEGYMALMKEDGVPDDMKGKDKIVFGNIHQIYDWHRDFFLGELEKCLEDPEKLGSLFVKHERRLHMYIAYCQNKPKSEHIVSEYIDTFFEDLKQRLGHRLQLTDLLIKPVQRIMKYQLLLKDFLKYSKKASLDTSELERAVEVMCIVPRRCNDMMNVGRLQGFDGKIVAQGKLLLQDTFLVTDQDAGLLPRCRERRIFLFEQIVIFSEPLDKKKGFSMPGFLFKNSIKVSCLCLEENVENDPCKFALTSRTGDVVETFILHSSSPSVRQTWIHEINQILENQRNFLNALTSPIEYQRNHSGGGGGGGSGGSGGGGGSGGGGAPSGGSGHSGGPSSCGGAPSTSRSRPSRIPQPVRHHPPVLVSSAASSQAEADKMSGTSTPGPSLPPPGAAPEAGPSAPSRRPPGADAEGSEREAEPIPKMKVLESPRKGAANASGSSPDAPAKDARASLGTLPLGKPRAGAASPLNSPLSSAVPSLGKEPFPPSSPLQKGGSFWSSIPASPASRPGSFTFPGDSDSLQRQTPRHAAPGKDTDRMSTCSSASEQSVQSTQSNGSESSSSSNISTMLVTHDYTAVKEDEINVYQGEVVQILASNQQNMFLVFRAATDQCPAAEGWIPGFVLGHTSAVIVENPDGTLKKSTSWHTALRLRKKSEKKDKDGKREGKLENGYRKSREGLSNKVSVKLLNPNYIYDVPPEFVIPLSEVTCETGETVVLRCRVCGRPKASITWKGPEHNTLNNDGHYSISYSDLGEATLKIVGVTTEDDGIYTCIAVNDMGSASSSASLRVLGPGMDGIMVTWKDNFDSFYSEVAELGRGRFSVVKKCDQKGTKRAVATKFVNKKLMKRDQVTHELGILQSLQHPLLVGLLDTFETPTSYILVLEMADQGRLLDCVVRWGSLTEGKIRAHLGEVLEAVRYLHNCRIAHLDLKPENILVDESLAKPTIKLADFGDAVQLNTTYYIHQLLGNPEFAAPEIILGNPVSLTSDTWSVGVLTYVLLSGVSPFLDDSVEETCLNICRLDFSFPDDYFKGVSQKAKEFVCFLLQEDPAKRPSAALALQEQWLQAGNGRSTGVLDTSRLTSFIERRKHQNDVRPIRSIKNFLQSRLLPRV

SEQ ID NO: 895 - protein, 1992 aa, Homo sapiens
MSNRPNNNPGGSLRRSQRNTAGAQPQDDSIGGRSCSSSSAVIVPQPEDPDRANTSERQKTGQVPKKDNSRGVKRSASPDYNRTNSPSSAKKPKALQHTESPSETNKPHSKSKKRHLDQEQQLKSAQSPSTSKAHTRKSGATGGSRSQKRKRTESSCVKSGSGSESTGAEERSAKPTKLASKSATSAKAGCSTITDSSSAASTSSSSSAVASASSTVPPGARVKQGKDQNKARRSRSASSPSPRRSSREKEQSKTGGSSKFDWAARFSPKVSLPKTKLSLPGSSKSETSKPGPSGLQAKLASLRKSTKKRSESPPAELPSLRRSTRQKTTGSCASTSRRGSGLGKRGAAEARRQEKMADPESNQEAVNSSAARTDEAPQGAAGAVGMTTSGESESDDSEMGRLQALLEARGLPPHLFGPLGPRMSQLFHRTIGSGASSKAQQLLQGLQASDESQQLQAVIEMCQLLVMGNEETLGGFPVKSVVPALITLLQMEHNFDIMNHACRALTYMMEALPRSSAVVVDAIPVFLEKLQVIQCIDVAEQALTALEMLSRRHSKAILQAGGLADCLLYLEFFSINAQRNALAIAANCCQSITPDEFHFVADSLPLLTQRLTHQDKKSVESTCLCFARLVDNFQHEENLLQQVASKDLLTNVQQLLVVTPPILSSGMFIMVVRMFSLMCSNCPTLAVQLMKQNIAETLHFLLCGASNGSCQEQIDLVPRSPQELYELTSLICELMPCLPKEGIFAVDTMLKKGNAQNTDGAIWQWRDDRGLWHPYNRIDSRIIEQINEDTGTARAIQRKPNPLANSNTSGYSESKKDDARAQLMKEDPELAKSFIKTLFGVLYEVYSSSAGPAVRHKCLRAILRIIYFADAELLKDVLKNHAVSSHIASMLSSQDLKIVVGALQMAEILMQKLPDIFSVYFRREGVMHQVKHLAESESLLTSPPKACTNGSGSMGSTTSVSSGTATAATHAAADLGSPSLQHSRDDSLDLSPQGRLSDVLKRKRLPKRGPRRPKYSPPRDDDKVDNQAKSPTTTQSPKSSFLASLNPKTWGRLSTQSNSNNIEPARTAGGSGLARAASKDTISNNREKIKGWIKEQAHKFVERYFSSENMDGSNPALNVLQRLCAATEQLNLQVDGGAECLVEIRSIVSESDVSSFEIQHSGFVKQLLLYLTSKSEKDAVSREIRLKRFLHVFFSSPLPGEEPIGRVEPVGNAPLLALVHKMNNCLSQMEQFPVKVHDFPSGNGTGGSFSLNRGSQALKFFNTHQLKCQLQRHPDCANVKQWKGGPVKIDPLALVQAIERYLVVRGYGRVREDDEDSDDDGSDEEIDESLAAQFLNSGNVRHRLQFYIGEHLLPYNMTVYQAVRQFSIQAEDERESTDDESNPLGRAGIWTKTHTIWYKPVREDEESNKDCVGGKRGRAQTAPTKTSPRNAKKHDELWHDGVCPSVSNPLEVYLIPTPPENITFEDPSLDVILLLRVLHAISRYWYYLYDNAMCKEIIPTSEFINSKLTAKANRQLQDPLVIMTGNIPTWLTELGKTCPFFFPFDTRQMLFYVTAFDRDRAMQRLLDTNPEINQSDSQDSRVAPRLDRKKRTVNREELLKQAESVMQDLGSSRAMLEIQYENEVGTGLGPTLEFYALVSQELQRADLGLWRGEEVTLSNPKGSQEGTKYIQNLQGLFALPFGRTAKPAHIAKVKMKFRFLGKLMAKAIMDFRLVDLPLGLPFYKWMLRQETSLTSHDLFDIDPVVARSVYHLEDIVRQKKRLEQDKSQTKESLQYALETLTMNGCSVEDLGLDFTLPGFPNIELKKGGKDIPVTIHNLEEYLRLVIFWALNEGVSRQFDSFRDGFESVFPLSHLQYFYPEELDQLLCGSKADTWDAKTLMECCRPDHGYTHDSRAVKFLFEILSSFDNEQQRLFLQFVTGSPRLPVGGFRSLNPPLTIVRKTFESTENPDDFLPSVMTCVNYLKLPDYSSIEIMREKLLIAAREGQQSFHLS

SEQ ID NO: 896 - protein, 931 aa, Homo sapiens
MSQSPAFGPRRGSSPRGAAGAAARRNESQDYLLMDSELGEDGCPQAPLPCYGYYPCFRGSDNRLAHRRQTVLREKGRRLANRGPAYMFSDRSTSLSIEEERFLDAAEYGNIPVVRKMLEECHSLNVNCVDYMGQNALQLAVANEHLEITELLLKKENLSRVGDALLLAISKGYVRIVEAILSHPAFAEGKRLATSPSQSELQQDDFYAYDEDGTRFSHDVTPIILAAHCQEYEIVHTLLRKGARIERPHDYFCKCNDCNQKQKHDSFSHSRSRINAYKGLASPAYLSLSSEDPVMTALELSNELAVLANIEKEFKNDYKKLSMQCKDFVVGLLDLCRNTEEVEAILNGDVETLQSGDHGRPNLSRLKLAIKYEVKKFVAHPNCQQQLLSIWYENLSGLRQQTMAVKFLVVLAVAIGLPFLALIYWFAPCSKMGKIMRGPFMKFVAHAASFTIFLGLLVMNAADRFEGTKLLPNETSTDNAKQLFRMKTSCFSWMEMLIISWVIGMIWAECKEIWTQGPKEYLFELWNMLDFGMLAIFAASFIARFMAFWHASKAQSIIDANDTLKDLTKVTLGDNVKYYNLARIKWDPSDPQIISEGLYAIAVVLSFSRIAYILPANESFGPLQISLGRTVKDIFKFMVIFIMVFVAFMIGMFNLYSYYIGAKQNEAFTTVEESFKTLFWAIFGLSEVKSVVINYNHKFIENIGYVLYGVYNVTMVIVLLNMLIAMINSSFQEIEDDADVEWKFARAKLWFSYFEEGRTLPVPFNLVPSPKSLFYLLLKLKKWISELFQGHKKGFQEDAEMNKINEEKKLGILGSHEDLSKLSLDKKQVGHNKQPSIRSSEDFHLNSFNNPPRQYQKIMKRLIKRYVLQAQIDKESDEVNEGELKEIKQDISSLRYELLEEKSQNTEDLAELIRELGEKLSMEPNQEETNR

SEQ ID NO: 897 - protein, 1642 aa, Homo sapiens
MSSFKRGSLKSSTSGSQKGQKSWIEKTFCKRECIFVIPSMKDSNRCCCGQFTNQHIPPLPSATPSKNEEESKQVETQPEKWSVAKHTQSYPTDSYGVLEFQGGGYSNKAMYIRVSYDTKPDSLLHLMVKDWQLELPKLLISVHGGLQNFEMQPKLKQVFGKGLIKAAMTTGAWIFTGGVSTGVISHVGDALKDHSSKSRGRVCAIGIAPWGIVENKEDLVGKDVTRVYQTMSNPLSKLSVLNNSHTHFILADNGTLGKYGAEVKLRRLLEKHISLQKINTRLGQGVPLVGLVVEGGPNVVSIVLEYLQEEPPIPVVICDGSGRASDILSFAHKYCEEGGIINESLREQLLVTIQKTFNYNKAQSHQLFAIIMECMKKKELVTVFRMGSEGQQDIEMAILTALLKGTNVSAPDQLSLALAWNRVDIARSQIFVFGPHWPPLGSLAPPTDSKATEKEKKPPMATTKGGRGKGKGKKKGKVKEEVEEETDPRKIELLNWVNALEQAMLDALVLDRVDFVKLLIENGVNMQHFLTIPRLEELYNTRLGPPNTLHLLVRDVKKSNLPPDYHISLIDIGLVLEYLMGGAYRCNYTRKNFRTLYNNLFGPKRPKALKLLGMEDDEPPAKGKKKKKKKKEEEIDIDVDDPAVSRFQYPFHELMVWAVLMKRQKMAVFLWQRGEESMAKALVACKLYKAMAHESSESDLVDDISQDLDNNSKDFGQLALELLDQSYKHDEQIAMKLLTYELKNWSNSTCLKLAVAAKHRDFIAHTCSQMLLTDMWMGRLRMRKNPGLKVIMGILLPPTILFLEFRTYDDFSYQTSKENEDGKEKEEENTDANADAGSRKGDEENEHKKQRSIPIGTKICEFYNAPIVKFWFYTISYLGYLLLFNYVILVRMDGWPSLQEWIVISYIVSLALEKIREILMSEPGKLSQKIKVWLQEYWNITDLVAISTFMIGAILRLQNQPYMGYGRVIYCVDIIFWYIRVLDIFGVNKYLGPYVMMIGKMMIDMLYFVVIMLVVLMSFGVARQAILHPEEKPSWKLARNIFYMPYWMIYGEVFADQIDLYAMEINPPCGENLYDEEGKRLPPCIPGAWLTPALMACYLLVANILLVNLLIAVFNNTFFEVKSISNQVWKFQRYQLIMTFHDRPVLPPPMIILSHIYIIIMRLSGRCRKKREGDQEERDRGLKLFLSDEELKRLHEFEEQCVQEHFREKEDEQQSSSDERIRVTSERVENMSMRLEEINERETFMKTSLQTVDLRLAQLEELSNRMVNALENLAGIDRSDLIQARSRASSECEATYLLRQSSINSADGYSLYRYHFNGEELLFEDTSLSTSPGTGVRKKTCSFRIKEEKDVKTHLVPECQNSLHLSLGTSTSATPDGSHLAVDDLKNAEESKLGPDIGISKEDDERQTDSKKEETISPSLNKTDVIHGQDKSDVQNTQLTVETTNIEGTISYPLEETKITRYFPDETINACKTMKSRSFVYSRGRKLVGGVNQDVEYSSITDQQLTTEWQCQVQKITRSHSTDIPYIVSEAAVQAEHKEQFADMQDEHHVAEAIPRIPRLSLTITDRNGMENLLSVKPDQTLGFPSLRSKSLHGHPRNVKSIQGKLDRSGHASSVSSLVIVSGMTAEEKKVKKEKASTETEC

SEQ ID NO: 898 - skipped

SEQ ID NO: 899 - protein, 1164 aa, Homo sapiens
MAQQANVGELLAMLDSPMLGVRDDVTAVFKENLNSDRGPMLVNTLVDYYLETSSQPALHILTTLQEPHDKHLLDRINEYVGKAATRLSILSLLGHVIRLQPSWKHKLSQAPLLPSLLKCLKMDTDVVVLTTGVLVLITMLPMIPQSGKQHLLDFFDIFGRLSSWCLKKPGHVAEVYLVHLHASVYALFHRLYGMYPCNFVSFLRSHYSMKENLETFEEVVKPMMEHVRIHPELVTGSKDHELDPRRWKRLETHDVVIECAKISLDPTEASYEDGYSVSHQISARFPHRSADVTTSPYADTQNSYGCATSTPYSTSRLMLLNMPGQLPQTLSSPSTRLITEPPQATLWSPSMVCGMTTPPTSPGNVPPDLSHPYSKVFGTTAGGKGTPLGTPATSPPPAPLCHSDDYVHISLPQATVTPPRKEERMDSARPCLHRQHHLLNDRGSEEPPGSKGSVTLSDLPGFLGDLASEEDSIEKDKEEAAISRELSEITTAEAEPVVPRGGFDSPFYRDSLPGSQRKTHSAASSSQGASVNPEPLHSSLDKLGPDTPKQAFTPIDLPCGSADESPAGDRECQTSLETSIFTPSPCKIPPPTRVGFGSGQPPPYDHLFEVALPKTAHHFVIRKTEELLKKAKGNTEEDGVPSTSPMEVLDRLIQQGADAHSKELNKLPLPSKSVDWTHFGGSPPSDEIRTLRDQLLLLHNQLLYERFKRQQHALRNRRLLRKVIKAAALEEHNAAMKDQLKLQEKDIQMWKVSLQKEQARYNQLQEQRDTMVTKLHSQIRQLQHDREEFYNQSQELQTKLEDCRNMIAELRIELKKANNKVCHTELLLSQVSQKLSNSESVQQQMEFLNRQLLVLGEVNELYLEQLQNKHSDTTKEVEMMKAAYRKELEKNRSHVLQQTQRLDTSQKRILELESHLAKKDHLLLEQKKYLEDVKLQARGQLQAAESRYEAQKRITQVFELEILDLYGRLEKDGLLKKLEEEKAEAAEAAEERLDCCNDGCSDSMVGHNEEASGHNGETKTPRPSSARGSSGSRGGGGSSSSSSELSTPEKPPHQRAGPFSSRWETTMGEASASIPTTVGSLPSSKSFLGMKARELFRNKSESQCDEDGMTSSLSESLKTELGKDLGVEAKIPLNLDGPHPSPPTPDSVGQLHIMDYNETHHEHS

SEQ ID NO: 900 - protein, 1807 aa, Homo sapiens
MAKPTSKDSGLKEKFKILLGLGTPRPNPRSAEGKQTEFIITAEILRELSMECGLNNRIRMIGQICEVAKTKKFEEHAVEALWKAVADLLQPERPLEARHAVLALLKAIVQGQGERLGVLRALFFKVIKDYPSNEDLHERLEVFKALTDNGRHITYLEEELADFVLQWMDVGLSSEFLLVLVNLVKFNSCYLDEYIARMVQMICLLCVRTASSVDIEVSLQVLDAVVCYNCLPAESLPLFIVTLCRTINVKELCEPCWKLMRNLLGTHLGHSAIYNMCHLMEDRAYMEDAPLLRGAVFFVGMALWGAHRLYSLRNSPTSVLPSFYQAMACPNEVVSYEIVLSITRLIKKYRKELQVVAWDILLNIIERLLQQLQTLDSPELRTIVHDLLTTVEELCDQNEFHGSQERYFELVERCADQRPESSLLNLISYRAQSIHPAKDGWIQNLQALMERFFRSESRGAVRIKVLDVLSFVLLINRQFYEEELINSVVISQLSHIPEDKDHQVRKLATQLLVDLAEGCHTHHFNSLLDIIEKVMARSLSPPPELEERDVAAYSASLEDVKTAVLGLLVILQTKLYTLPASHATRVYEMLVSHIQLHYKHSYTLPIASSIRLQAFDFLLLLRADSLHRLGLPNKDGVVRFSPYCVCDYMEPERGSEKKTSGPLSPPTGPPGPAPAGPAVRLGSVPYSLLFRVLLQCLKQESDWKVLKLVLGRLPESLRYKVLIFTSPCSVDQLCSALCSMLSGPKTLERLRGAPEGFSRTDLHLAVVPVLTALISYHNYLDKTKQREMVYCLEQGLIHRCASQCVVALSICSVEMPDIIIKALPVLVVKLTHISATASMAVPLLEFLSTLARLPHLYRNFAAEQYASVFAISLPYTNPSKFNQYIVCLAHHVIAMWFIRCRLPFRKDFVPFITKGLRSNVLLSFDDTPEKDSFRARSTSLNERPKSLRIARPPKQGLNNSPPVKEFKESSAAEAFRCRSISVSEHVVRSRIQTSLTSASLGSADENSVAQADDSLKNLHLELTETCLDMMARYVFSNFTAVPKRSPVGEFLLAGGRTKTWLVGNKLVTVTTSVGTGTRSLLGLDSGELQSGPESSSSPGVHVRQTKEAPAKLESQAGQQVSRGARDRVRSMSGGHGLRVGALDVPASQFLGSATSPGPRTAPAAKPEKASAGTRVPVQEKTNLAAYVPLLTQGWAEILVRRPTGNTSWLMSLENPLSPFSSDINNMPLQELSNALMAAERFKEHRDTALYKSLSVPAASTAKPPPLPRSNTVASFSSLYQSSCQGQLHRSVSWADSAVVMEEGSPGEVPVLVEPPGLEDVEAALGMDRRTDAYSRSSSVSSQEEKSLHAEELVGRGIPIERVVSSEGGRPSVDLSFQPSQPLSKSSSSPELQTLQDILGDPGDKADVGRLSPEVKARSQSGTLDGESAAWSASGEDSRGQPEGPLPSSSPRSPSGLRPRGYTISDSAPSRRGKRVERDALKSRATASNAEKVPGINPSFVFLQLYHSPFFGDESNKPILLPNESQSFERSVQLLDQIPSYDTHKIAVLYVGEGQSNSELAILSNEHGSYRYTEFLTGLGRLIELKDCQPDKVYLGGLDVCGEDGQFTYCWHDDIMQAVFHIATLMPTKDVDKHRCDKKRHLGNDFVSIVYNDSGEDFKLGTIKGQFNFVHVIVTPLDYECNLVSLQCRKDMEGLVDTSVAKIVSDRNLPFVARQMALHANMASQVHHSRSNPTDIYPSKWIARLRHIKRLRQRICEEAAYSNPSLPLVHPPSHSKAPAQTPAEPTPGYEVGQRKRLISSVEDFTEFV

SEQ ID NO: 901 - protein, 1081 aa, Homo sapiens
MPRRKQQAPRRAAAYVSEELKAAALVDEGLDPEEHTADGEPSAKYMCPEKELARACPSYQNSPAAEFSCHEMDSESHISETSDRMADFESGSIKNEEETKEVTVPLEDTTVSDSLEQMKAVYNNFLSNSYWSNLNLNLHQPSSEKNNGSSSSSSSSSSSCGSGSFDWHQSAMAKTLQQVSQSRMLPEPSLFSTVQLYRQSSKLYGSIFTGASKFRCKDCSAAYDTLVELTVHMNETGHYRDDNHETDNNNPKRWSKPRKRSLLEMEGKEDAQKVLKCMYCGHSFESLQDLSVHMIKTKHYQKVPLKEPVTPVAAKIIPATRKKASLELELPSSPDSTGGTPKATISDTNDALQKNSNPYITPNNRYGHQNGASYAWHFEARKSQILKCMECGSSHDTLQELTAHMMVTGHFIKVTNSAMKKGKPIVETPVTPTITTLLDEKVQSVPLAATTFTSPSNTPASISPKLNVEVKKEVDKEKAVTDEKPKQKDKPGEEEEKCDISSKYHYLTENDLEESPKGGLDILKSLENTVTSAINKAQNGTPSWGGYPSIHAAYQLPNMMKLSLGSSGKSTPLKPMFGNSEIVSPTKNQTLVSPPSSQTSPMPKTNFHAMEELVKKVTEKVAKVEEKMKEPDGKLSPPKRATPSPCSSEVGEPIKMEASSDGGFRSQENSPSPPRDGCKDGSPLAEPVENGKELVKPLASSLSGSTAIITDHPPEQPFVNPLSALQSVMNIHLGKAAKPSLPALDPMSMLFKMSNSLAEKAAVATPPPLQSKKADHLDRYFYHVNNDQPIDLTKGKSDKGCSLGSVLLSPTSTAPATSSSTVTTAKTSAVVSFMSNSPLRENALSDISDMLKNLTESHTSKSSTPSSISEKSDIDGATLEEAEESTPAQKRKGRQSNWNPQHLLILQAQFAASLRQTSEGKYIMSDLSPQERMHISRFTGLSMTTISHWLANVKYQLRRTGGTKFLKNLDTGHPVFFCNDCASQIRTPSTYISHLESHLGFRLRDLSKLSTEQINSQIAQTKSPSEKMVTSSPEEDLGTSYQCKLCNRTFASKHAVKLHLSKTHGKSPEDHLLYVSELEKQ

SEQ ID NO: 902 - protein, 228 aa, Homo sapiens
MSVSEIFVELQGFLAAEQDIREEIRKVVQSLEQTAREILTLLQGVHQGAGFQDIPKRCLKAREHFGTVKTHLTSLKTKFPAEQYYRFHEHWRFVLQRLVFLAAFVVYLETETLVTREAVTEILGIEPDREKGFHLDVEDYLSGVLILASELSRLSVNSVTAGDYSRPLHISTFINELDSGFRLLNLKNDSLRKRYDGLKYDVKKVEEVVYDLSIRGFNKETAAACVEK

SEQ ID NO: 903 - protein, 249 aa, Homo sapiens
MASRRMETKPVITCLKTLLIIYSFVFWITGVILLAVGVWGKLTLGTYISLIAENSTNAPYVLIGTGTTIVVFGLFGCFATCRGSPWMLKLYAMFLSLVFLAELVAGISGFVFRHEIKDTFLRTYTDAMQTYNGNDERSRAVDHVQRSLSCCGVQNYTNWSTSPYFLEHGIPPSCCMNETDCNPQDLHNLTVAATKVNQKGCYDLVTSFMETNMGIIAGVAFGIAFSQLIGMLLACCLSRFITANQYEMV

SEQ ID NO: 904 - protein, 508 aa, Homo sapiens
MELDSALEAPSQEDSNLSEELSHSAFGQAFSKILHCLARPEARRGNVKDAVLKDLGDLIEATEFDRLFEGTGARLRGMPETLGQVAKALEKYAAPSKEEEGGGDGHSEAAEKAAQVGLLFLKLLGKVETAKNSLVGPAWQTGLHHLAGPVYIFAITHSLEQPWTTPRSREVAREVLTSLLQVTECGSVAGFLHGENEDEKGRLSVILGLLKPDLYKESWKNNPAIKHVFSWTLQQVTRPWLSQHLERVLPASLVISDDYQTENKILGVHCLHHIVLNVPAADLLQYNRAQVLYHAISNHLYTPEHHLIQAVLLCLLDLFPILEKTLHWKGDGARPTTHCDEVLRLILTHMEPEHRLLLRRTYARNLPAFVNRLGILTVRHLKRLERVIIGYLEVYDGPEEEARLKILETLKLLMQHTWPRVSCRLVVLLKALLKLICDVARDPNLTPESVKSALLQEATDCLILLDRCSQGRVKGLLAKIPQSCEDRKVVNYIRKVQQVSEGAPYNGT

SEQ ID NO: 905 - protein, 35991 aa, Homo sapiens
MTTQAPTFTQPLQSVVVLEGSTATFEAHISGFPVPEVSWFRDGQVISTSTLPGVQISFSDGRAKLTIPAVTKANSGRYSLKATNGSGQATSTAELLVKAETAPPNFVQRLQSMTVRQGSQVRLQVRVTGIPTPVVKFYRDGAEIQSSLDFQISQEGDLYSLLIAEAYPEDSGTYSVNATNSVGRATSTAELLVQGEEEVPAKKTKTIVSTAQISESRQTRIEKKIEAHFDARSIATVEMVIDGAAGQQLPHKTPPRIPPKPKSRSPTPPSIAAKAQLARQQSPSPIRHSPSPVRHVRAPTPSPVRSVSPAARISTSPIRSVRSPLLMRKTQASTVATGPEVPPPWKQEGYVASSSEAEMRETTLTTSTQIRTEERWEGRYGVQEQVTISGAAGAAASVSASASYAAEAVATGAKEVKQDADKSAAVATVVAAVDMARVREPVISAVEQTAQRTTTTAVHIQPAQEQVRKEAEKTAVTKVVVAADKAKEQELKSRTKEVITTKQEQMHVTHEQIRKETEKTFVPKVVISAAKAKEQETRISEEITKKQKQVTQEAIRQETEITAASMVVVATAKSTKLETVPGAQEETTTQQDQMHLSYEKIMKETRKTVVPKVIVATPKVKEQDLVSRGREGITTKREQVQITQEKMRKEAEKTALSTIAVATAKAKEQETILRTRETMATRQEQIQVTHGKVDVGKKAEAVATVVAAVDQARVREPREPGHLEESYAQQTTLEYGYKERISAAKVAEPPQRPASEPHVVPKAVKPRVIQAPSETHIKTTDQKGMHISSQIKKTTDLTTERLVHVDKRPRTASPHFTVSKISVPKTEHGYEASIAGSAIATLQKELSATSSAQKITKSVKAPTVKPSETRVRAEPTPLPQFPFADTPDTYKSEAGVEVKKEVGVSITGTTVREERFEVLHGREAKVTETARVPAPVEIPVTPPTLVSGLKNVTVIEGESVTLECHISGYPSPTVTWYREDYQIESSIDFQITFQSGIARLMIREAFAEDSGRFTCSAVNEAGTVSTSCYLAVQVSEEFEKETTAVTEKFTTEEKRFVESRDVVMTDTSLTEEQAGPGEPAAPYFITKPVVQKLVEGGSVVFGCQVGGNPKPHVYWKKSGVPLTTGYRYKVSYNKQTGECKLVISMTFADDAGEYTIVVRNKHGETSASASLLEEADYELLMKSQQEMLYQTQVTAFVQEPKVGETAPGFVYSEYEKEYEKEQALIRKKMAKDTVVVRTYVEDQEFHISSFEERLIKEIEYRIIKTTLEELLEEDGEEKMAVDISESEAVESGFDSRIKNYRILEGMGVTFHCKMSGYPLPKIAWYKDGKRIKHGERYQMDFLQDGRASLRIPVVLPEDEGIYTAFASNIKGNAICSGKLYVEPAAPLGAPTYIPTLEPVSRIRSLSPRSVSRSPIRMSPARMSPARMSPARMSPARMSPGRRLEETDESQLERLYKPVFVLKPVSFKCLEGQTARFDLKVVGRPMPETFWFHDGQQIVNDYTHKVVIKEDGTQSLIIVPATPSDSGEWTVVAQNRAGRSSISVILTVEAVEHQVKPMFVEKLKNVNIKEGSRLEMKVRATGNPNPDIVWLKNSDIIVPHKYPKIRIEGTKGEAALKIDSTVSQDSAWYTATAINKAGRDTTRCKVNVEVEFAEPEPERKLIIPRGTYRAKEIAAPELEPLHLRYGQEQWEEGDLYDKEKQQKPFFKKKLTSLRLKRFGPAHFECRLTPIGDPTMVVEWLHDGKPLEAANRLRMINEFGYCSLDYGVAYSRDSGIITCRATNKYGTDHTSATLIVKDEKSLVEESQLPEGRKGLQRIEELERMAHEGALTGVTTDQKEKQKPDIVLYPEPVRVLEGETARFRCRVTGYPQPKVNWYLNGQLIRKSKRFRVRYDGIHYLDIVDCKSYDTGEVKVTAENPEGVIEHKVKLEIQQREDFRSVLRRAPEPRPEFHVHEPGKLQFEVQKVDRPVDTTETKEVVKLKRAERITHEKVPEESEELRSKFKRRTEEGYYEAITAVELKSRKKDESYEELLRKTKDELLHWTKELTEEEKKALAEEGKITIPTFKPDKIELSPSMEAPKIFERIQSQTVGQGSDAHFRVRVVGKPDPECEWYKNGVKIERSDRIYWYWPEDNVCELVIRDVTAEDSASIMVKAINIAGETSSHAFLLVQAKQLITFTQELQDVVAKEKDTMATFECETSEPFVKVKWYKDGMEVHEGDKYRMHSDRKVHFLSILTIDTSDAEDYSCVLVEDENVKTTAKLIVEGAVVEFVKELQDIEVPESYSGELECIVSPENIEGKWYHNDVELKSNGKYTITSRRGRQNLTVKDVTKEDQGEYSFVIDGKKTTCKLKMKPRPIAILQGLSDQKVCEGDIVQLEVKVSLESVEGVWMKDGQEVQPSDRVHIVIDKQSHMLLIEDMTKEDAGNYSFTIPALGLSTSGRVSVYSVDVITPLKDVNVIEGTKAVLECKVSVPDVTSVKWYLNDEQIKPDDRVQAIVKGTKQRLVINRTHASDEGPYKLIVGRVETNCNLSVEKIKIIRGLRDLTCTETQNVVFEVELSHSGIDVLWNFKDKEIKPSSKYKIEAHGKIYKLTVLNMMKDDEGKYTFYAGENMTSGKLTVAGGAISKPLTDQTVAESQEAVFECEVANPDSKGEWLRDGKHLPLTNNIRSESDGHKRRLIIAATKLDDIGEYTYKVATSKTSAKLKVEAVKIKKTLKNLTVTETQDAVFTVELTHPNVKGVQWIKNGVVLESNEKYAISVKGTIYSLRIKNCAIVDESVYGFRLGRLGASARLHVETVKIIKKPKDVTALENATVAFEVSVSHDTVPVKWFHKSVEIKPSDKHRLVSERKVHKLMLQNISPSDAGEYTAVVGQLECKAKLFVETLHITKTMKNIEVPETKTASFECEVSHFNVPSMWLKNGVEIEMSEKFKIVVQGKLHQLIIMNTSTEDSAEYTFVCGNDQVSATLTVTPIMITSMLKDINAEEKDTITFEVTVNYEGISYKWLKNGVEIKSTDKCQMRTKKLTHSLNIRNVHFGDAADYTFVAGKATSTATLYVEARHIEFRKHIKDIKVLEKKRAMFECEVSEPDITVQWMKDDQELQITDRIKIQKEKYVHRLLIPSTRMSDAGKYTVVAGGNVSTAKLFVEGRDVRIRSIKKEVQVIEKQRAVVEFEVNEDDVDAHWYKDGIEINFQVQERHKYVVERRIHRMFISETRQSDAGEYTFVAGRNRSSVTLYVNAPEPPQVLQELQPVTVQSGKPARFCAVISGRPQPKISWYKEEQLLSTGFKCKFLHDGQEYTLLLIEAFPEDAAVYTCEAKNDYGVATTSASLSVEVPEVVSPDQEMPVYPPAIITPLQDTVTSEGQPARFQCRVSGTDLKVSWYSKDKKIKPSRFFRMTQFEDTYQLEIAEAYPEDEGTYTFVASNAVGQVSSTANLSLEGFSKFEENTSNSQWHVSLSVSFKKEPLGQKPSFIQPLSSLRVHNGETVRFHARVSGIPKPEIQWFHNQQLILPTKDVVFHFEESTGMALMLIVDAYSEHAGQYSCKAANSAGEATCAATLTVTPKVQALDRQSSGKDVRESAKSQAVADSSFTKEESKISQKEIKSFQGSSYEYEVQVFESVSQSSIHTAASVQDTQLCHTASLSQIAESTELSKECAKESTGEAPKIFLHLQDVTVKCGDTAQFLCVLKDDSFIDVTWTHEGAKIEESERLKQSQNGNIQFLTICNVQLVDQGLYSCIVHNDCGERTTSAVLSVEGAPESILHERIEQEIEMEMKEFSSSFLSAEEEGLHSAELQLSKINETLELLSESPVYPTKFDSEKEGTGPIFIKEVSNADISMGDVATLSVTVIGIPKPKIQWFFNGVLLTPSADYKFVFDGDDHSLIILFTKLEDEGEYTCMASNDYGKTICSAYLKINSKGEGHKDTETESAVAKSLEKLGGPCPPHFLKELKPIRCAQGLPAIFEYTVVGEPAPTVTWFKENKQLCTSVYYTIIHNPNGSGTFIVNDPQREDSGLYICKAENMLGESTCAAELLVLLEDTDMTDTPCKAKSTPEAPEDFPQTPLKGPAVEALDSEQEIATFVKDTILKAALITEENQQLSYEHIAKANELSSQLPLGAQELQSILEQDKLTPESTREFLCINGSIHFQPLKEPSPNLQLQIVQSQKTFSKEGILMPEEPETQAVLSDTEKIFPSAMSIEQINSLTVEPLKTLLAEPEGNYPQSSIEPPMHSYLTSVAEEVLSPKEKTVSDTNREQRVTLQKQEAQSALILSQSLAEGHVESLQSPDVMISQVNYEPLVPSEHSCTEGGKILIESANPLENAGQDSAVRIEEGKSLRFPLALEEKQVLLKEEHSDNVVMPPDQIIESKREPVAIKKVQEVQGRDLLSKESLLSGIPEEQRLNLKIQICRALQAAVASEQPGLFSEWLRNIEKVEVEAVNITQEPRHIMCMYLVTSAKSVTEEVTIIIEDVDPQMANLKMELRDALCAIIYEEIDILTAEGPRIQQGAKTSLQEEMDSFSGSQKVEPITEPEVESKYLISTEEVSYFNVQSRVKYLDATPVTKGVASAVVSDEKQDESLKPSEEKEESSSESGTEEVATVKIQEAEGGLIKEDGPMIHTPLVDTVSEEGDIVHLTTSITNAKEVNWYFENKLVPSDEKFKCLQDQNTYTLVIDKVNTEDHQGEYVCEALNDSGKTATSAKLTVVKRAAPVIKRKIEPLEVALGHLAKFTCEIQSAPNVRFQWFKAGREIYESDKCSIRSSKYISSLEILRTQVVDCGEYTCKASNEYGSVSCTATLTVTEAYPPTFLSRPKSLTTFVGKAAKFICTVTGTPVIETIWQKDGAALSPSPNWRISDAENKHILELSNLTIQDRGVYSCKASNKFGADICQAELIIIDKPHFIKELEPVQSAINKKVHLECQVDEDRKVTVTWSKDGQKLPPGKDYKICFEDKIATLEIPLAKLKDSGTYVCTASNEAGSSSCSATVTVREPPSFVKKVDPSYLMLPGESARLHCKLKGSPVIQVTWFKNNKELSESNTVRMYFVNSEAILDITDVKVEDSGSYSCEAVNDVGSDSCSTEIVIKEPPSFIKTLEPADIVRGTNALLQCEVSGTGPFEISWFKDKKQIRSSKKYRLFSQKSLVCLEIFSFNSADVGEYECVVANEVGKCGCMATHLLKEPPTFVKKVDDLIALGGQTVTLQAAVRGSEPISVTWMKGQEVIREDGKIKMSFSNGVAVLIIPDVQISFGGKYTCLAENEAGSQTSVGELIVKEPAKIIERAELIQVTAGDPATLEYTVAGTPELKPKWYKDGRPLVASKKYRISFKNNVAQLKFYSAELHDSGQYTFEISNEVGSSSCETTFTVLDRDIAPFFTKPLRNVDSVVNGTCRLDCKIAGSLPMRVSWFKDGKEIAASDRYRIAFVEGTASLEIIRVDMNDAGNFTCRATNSVGSKDSSGALIVQEPPSFVTKPGSKDVLPGSAVCLKSTFQGSTPLTIRWFKGNKELVSGGSCYITKEALESSLELYLVKTSDSGTYTCKVSNVAGGVECSANLFVKEPATFVEKLEPSQLLKKGDATQLACKVTGTPPIKITWFANDREIKESSKHRMSFVESTAVLRLTDVGIEDSGEYMCEAQNEAGSDHCSSIVIVKESPYFTKEFKPIEVLKEYDVMLLAEVAGTPPFEITWFKDNTILRSGRKYKTFIQDHLVSLQILKFVAADAGEYQCRVTNEVGSSICSARVTLREPPSFIKKIESTSSLRGGTAAFQATLKGSLPITVTWLKDSDEITEDDNIRMTFENNVASLYLSGIEVKHDGKYVCQAKNDAGIQRCSALLSVKEPATITEEAVSIDVTQGDPATLQVKFSGTKEITAKWFKDGQELTLGSKYKISVTDTVSILKIISTEKKDSGEYTFEVQNDVGRSSCKARINVLDLIIPPSFTKKLKKMDSIKGSFIDLECIVAGSHPISIQWFKDDQEISASEKYKFSFHDNTAFLEISQLEGTDSGTYTCSATNKAGHNQCSGHLTVKEPPYFVEKPQSQDVNPNTRVQLKALVGGTAPMTIKWFKDNKELHSGAARSVWKDDTSTSLELFAAKATDSGTYICQLSNDVGTATSKATLFVKEPPQFIKKPSPVLVLRNGQSTTFECQITGTPKIRVSWYLDGNEITAIQKHGISFIDGLATFQISGARVENSGTYVCEARNDAGTASCSIELKVKEPPTFIRELKPVEVVKYSDVELECEVTGTPPFEVTWLKNNREIRSSKKYTLTDRVSVFNLHITKCDPSDTGEYQCIVSNEGGSCSCSTRVALKEPPSFIKKIENTTTVLKSSATFQSTVAGSPPISITWLKDDQILDEDDNVYISFVDSVATLQIRSVDNGHSGRYTCQAKNESGVERCYAFLLVQEPAQIVEKAKSVDVTEKDPMTLECVVAGTPELKVKWLKDGKQIVPSRYFSMSFENNVASFRIQSVMKQDSGQYTFKVENDFGSSSCDAYLRVLDQNIPPSFTKKLTKMDKVLGSSIHMECKVSGSLPISAQWFKDGKEISTSAKYRLVCHERSVSLEVNNLELEDTANYTCKVSNVAGDDACSGILTVKEPPSFLVKPGRQQAIPDSTVEFKAILKGTPPFKIKWFKDDVELVSGPKCFIGLEGSTSFLNLYSVDASKTGQYTCHVTNDVGSDSCTTMLLVTEPPKFVKKLEASKIVKAGDSSRLECKIAGSPEIRVVWFRNEHELPASDKYRMTFIDSVAVIQMNNLSTEDSGDFICEAQNPAGSTSCSTKVIVKEPPVFSSFPPIVETLKNAEVSLECELSGTPPFEVVWYKDKRQLRSSKKYKIASKNFHTSIHILNVDTSDIGEYHCKAQNEVGSDTCVCTVKLKEPPRFVSKLNSLTVVAGEPAELQASIEGAQPIFVQWLKEKEEVIRESENIRITFVENVATLQFAKAEPANAGKYICQIKNDGGMRENMATLMVLEPAVIVEKAGPMTVTVGETCTLECKVAGTPELSVEWYKDGKLLTSSQKHKFSFYNKISSLRILSVERQDAGTYTFQVQNNVGKSSCTAVVDVSDRAVPPSFTRRLKNTGGVLGASCILECKVAGSSPISVAWFHEKTKIVSGAKYQTTFSDNVCTLQLNSLDSSDMGNYTCVAANVAGSDECRAVLTVQEPPSFVKEPEPLEVLPGKNVTFTSVIRGTPPFKVNWFRGARELVKGDRCNIYFEDTVAELELFNIDISQSGEYTCVVSNNAGQASCTTRLFVKEPAAFLKRLSDHSVEPGKSIILESTYTGTLPISVTWKKDGFNITTSEKCNIVTTEKTCILEILNSTKRDAGQYSCEIENEAGRDVCGALVSTLEPPYFVTELEPLEAAVGDSVSLQCQVAGTPEITVSWYKGDTKLRPTPEYRTYFTNNVATLVFNKVNINDSGEYTCKAENSIGTASSKTVFRIQERQLPPSFARQLKDIEQTVGLPVTLTCRLNGSAPIQVCWYRDGVLLRDDENLQTSFVDNVATLKILQTDLSHSGQYSCSASNPLGTASSSARLTAREPKKSPFFDIKPVSIDVIAGESADFECHVTGAQPMRITWSKDNKEIRPGGNYTITCVGNTPHLRILKVGKGDSGQYTCQATNDVGKDMCSAQLSVKEPPKFVKKLEASKVAKQGESIQLECKISGSPEIKVSWFRNDSELHESWKYNMSFINSVALLTINEASAEDSGDYICEAHNGVGDASCSTALTVKAPPVFTQKPSPVGALKGSDVILQCEISGTPPFEVVWVKDRKQVRNSKKFKITSKHFDTSLHILNLEASDVGEYHCKATNEVGSDTCSCSVKFKEPPRFVKKLSDTSTLIGDAVELRAIVEGFQPISVVWLKDRGEVIRESENTRISFIDNIATLQLGSPEASNSGKYICQIKNDAGMRECSAVLTVLEPARIIEKPEPMTVTTGNPFALECVVTGTPELSAKWFKDGRELSADSKHHITFINKVASLKIPCAEMSDKGLYSFEVKNSVGKSNCTVSVHVSDRIVPPSFIRKLKDVNAILGASVVLECRVSGSAPISVGWFQDGNEIVSGPKCQSSFSENVCTLNLSLLEPSDTGIYTCVAANVAGSDECSAVLTVQEPPSFEQTPDSVEVLPGMSLTFTSVIRGTPPFKVKWFKGSRELVPGESCNISLEDFVTELELFEVQPLESGDYSCLVTNDAGSASCTTHLFVKEPATFVKRLADFSVETGSPIVLEATYTGTPPISVSWIKDEYLISQSERCSITMTEKSTILEILESTIEDYAQYSCLIENEAGQDICEALVSVLEPPYFIEPLEHVEAVIGEPATLQCKVDGTPEIRISWYKEHTKLRSAPAYKMQFKNNVASLVINKVDHSDVGEYSCKADNSVGAVASSAVLVIKARKLPPFFARKLKDVHETLGFPVAFECRINGSEPLQVSWYKDGVLLKDDANLQTSFVHNVATLQILQTDQSHIGQYNCSASNPLGTASSSAKLILSEHEVPPFFDLKPVSVDLALGESGTFKCHVTGTAPIKITWAKDNREIRPGGNYKMTLVENTATLTVLKVGKGDAGQYTCYASNIAGKDSCSAQLGVQEPPRFIKKLEPSRIVKQDEFTRYECKIGGSPEIKVLWYKDETEIQESSKFRMSFVDSVAVLEMHNLSVEDSGDYTCEAHNAAGSASSSTSLKVKEPPIFRKKPHPIETLKGADVHLECELQGTPPFHVSWYKDKRELRSGKKYKIMSENFLTSIHILNVDAADIGEYQCKATNDVGSDTCVGSIALKAPPRFVKKLSDISTVVGKEVQLQTTIEGAEPISVVWFKDKGEIVRESDNIWISYSENIATLQFSRVEPANAGKYTCQIKNDAGMQECFATLSVLEPATIVEKPESIKVTTGDTCTLECTVAGTPELSTKWFKDGKELTSDNKYKISFFNKVSGLKIINVAPSDSGVYSFEVQNPVGKDSCTASLQVSDRTVPPSFTRKLKETNGLSGSSVVMECKVYGSPPISVSWFHEGNEISSGRKYQTTLTDNTCALTVNMLEESDSGDYTCIATNMAGSDECSAPLTVREPPSFVQKPDPMDVLTGTNVTFTSIVKGTPPFSVSWFKGSSELVPGDRCNVSLEDSVAELELFDVDTSQSGEYTCIVSNEAGKASCTTHLYIKAPAKFVKRLNDYSIEKGKPLILEGTFTGTPPISVTWKKNGINVTPSQRCNITTTEKSAILEIPSSTVEDAGQYNCYIENASGKDSCSAQILILEPPYFVKQLEPVKVSVGDSASLQCQLAGTPEIGVSWYKGDTKLRPTTTYKMHFRNNVATLVFNQVDINDSGEYICKAENSVGEVSASTFLTVQEQKLPPSFSRQLRDVQETVGLPVVFDCAISGSEPISVSWYKDGKPLKDSPNVQTSFLDNTATLNIFKTDRSLAGQYSCTATNPIGSASSSARLILTEGKNPPFFDIRLAPVDAVVGESADFECHVTGTQPIKVSWAKDSREIRSGGKYQISYLENSAHLTVLKVDKGDSGQYTCYAVNEVGKDSCTAQLNIKERLIPPSFTKRLSETVEETEGNSFKLEGRVAGSQPITVAWYKNNIEIQPTSNCEITFKNNTLVLQVRKAGMNDAGLYTCKVSNDAGSALCTSSIVIKEPKKPPVFDQHLTPVTVSEGEYVQLSCHVQGSEPIRIQWLKAGREIKPSDRCSFSFASGTAVLELRDVAKADSGDYVCKASNVAGSDTTKSKVTIKDKPAVAPATKKAAVDGRLFFVSEPQSIRVVEKTTATFIAKVGGDPIPNVKWTKGKWRQLNQGGRVFIHQKGDEAKLEIRDTTKTDSGLYRCVAFNEHGEIESNVNLQVDERKKQEKIEGDLRAMLKKTPILKKGAGEEEEIDIMELLKNVDPKEYEKYARMYGITDFRGLLQAFELLKQSQEEETHRLEIEEIERSERDEKEFEELVSFIQQRLSQTEPVTLIKDIENQTVLKDNDAVFEIDIKINYPEIKLSWYKGTEKLEPSDKFEISIDGDRHTLRVKNCQLKDQGNYRLVCGPHIASAKLTVIEPAWERHLQDVTLKEGQTCTMTCQFSVPNVKSEWFRNGRILKPQGRHKTEVEHKVHKLTIADVRAEDQGQYTCKYEDLETSAELRIEAEPIQFTKRIQNIVVSEHQSATFECEVSFDDAIVTWYKGPTELTESQKYNFRNDGRCHYMTIHNVTPDDEGVYSVIARLEPRGEARSTAELYLTTKEIKLELKPPDIPDSRVPIPTMPIRAVPPEEIPPVVAPPIPLLLPTPEEKKPPPKRIEVTKKAVKKDAKKVVAKPKEMTPREEIVKKPPPPTTLIPAKAPEIIDVSSKAEEVKIMTITRKKEVQKEKEAVYEKKQAVHKEKRVFIESFEEPYDELEVEPYTEPFEQPYYEEPDEDYEEIKVEAKKEVHEEWEEDFEEGQEYYEREEGYDEGEEEWEEAYQEREVIQVQKEVYEESHERKVPAKVPEKKAPPPPKVIKKPVIEKIEKTSRRMEEEKVQVTKVPEVSKKIVPQKPSRTPVQEEVIEVKVPAVHTKKMVISEEKMFFASHTEEEVSVTVPEVQKEIVTEEKIHVAISKRVEPPPKVPELPEKPAPEEVAPVPIPKKVEPPAPKVPEVPKKPVPEEKKPVPVPKKEPAAPPKVPEVPKKPVPEEKIPVPVAKKKEAPPAKVPEVQKGVVTEEKITIVTQREESPPPAVPEIPKKKVPEERKPVPRKEEEVPPPPKVPALPKKPVPEEKVAVPVPVAKKAPPPRAEVSKKTVVEEKRFVAEEKLSFAVPQRVEVTRHEVSAEEEWSYSEEEEGVSISVYREEEREEEEEAEVTEYEVMEEPEEYVVEEKLHIISKRVEAEPAEVTERQEKKIVLKPKIPAKIEEPPPAKVPEAPKKIVPEKKVPAPVPKKEKVPPPKVPEEPKKPVPEKKVPPKVIKMEEPLPAKVTERHMQITQEEKVLVAVTKKEAPPKARVPEEPKRAVPEEKVLKLKPKREEEPPAKVTEFRKRVVKEEKVSIEAPKREPQPIKEVTIMEEKERAYTLEEEAVSVQREEEYEEYEEYDYKEFEEYEPTEEYDQYEEYEEREYERYEEHEEYITEPEKPIPVKPVPEEPVPTKPKAPPAKVLKKAVPEEKVPVPIPKKLKPPPPKVPEEPKKVFEEKIRISITKREKEQVTEPAAKVPMKPKRVVAEEKVPVPRKEVAPPVRVPEVPKELEPEEVAFEEEVVTHVEEYLVEEEEEYIHEEEEFITEEEVVPVIPVKVPEVPRKPVPEEKKPVPVPKKKEAPPAKVPEVPKKPEEKVPVLIPKKEKPPPAKVPEVPKKPVPEEKVPVPVPKKVEAPPAKVPEVPKKPVPEKKVPVPAPKKVEAPPAKVPEVPKKLIPEEKKPTPVPKKVEAPPPKVPKKREPVPVPVALPQEEEVLFEEEIVPEEEVLPEEEEVLPEEEEVLPEEEEVLPEEEEIPPEEEEVPPEEEYVPEEEEFVPEEEVLPEVKPKVPVPAPVPEVPKKPVPEKKVPVPAPKKVEPPPPPKVPEIKKKVTEKKVVIPKKEEAPPAKVSVVPKKPEPEKKVPPPGLKKAVAPPAKVPEVPKKVEEKRIILPKEEEVLPVEVTEEPEEEPISEEEIPEEPPSIEEVEEVAPPRVPEVIKKAVPEAPTPVPKKVEAPPAKVSKKIPEEKVPVPVQKKEAPPAKVPEVPKKVPEKKVLVPKKEAVPPAKGRTVLEEKVSVAFRQEVVVKERLELEVVEAEVEEIPEEEEFHEVEEYFEEGEFHEVEEFIKLEQHRVEEEHRVEKVHRVIEVFEAEEVEVFEKPKAPPKGPEISEKIIPPKKPPTKVVPRKEPPAKVPEVPKKIVVEEKVRVPEEPRVPPTKAPEVPKKIVPEEKVREAVLKKPEVPPAKVPGMPKKSVQEEKSPIVISEDTEMYIYEASEEAVLEEKVLVTQPQKTKPKLAKVPEPPKKVVPEDKIYVTIPKKRETPATKEPDTTRGIFPEVEPPEAIPEIPEHPPTEEFEVFKEVIPEGETPIVKRRKTPSPTVPESPREIVPVKETPMAAPLEIEIPPTKAPEAMKEVVPEMKIFEDVPEEPETPRMKTPEAPQEIIPAKTVPSKKREPPSVKVPEALQEIVPEKKTLVVPLRKPEVLPDEVPEALREVVPEKKVHPPQRAEVVPVKVHEAPKEIIPEKKVSVVPPKKPEVPPVKVPEASKEVIREEKVPLAPPKEPEVPPVKVPEPPKEVVPEKKAPVAPPKEPEVPPVKVPEAPKEVVPEKKVPVPPPKKPEVPPTKVPEVPKAAVPEKKLPEAIPPKPESPPPEVPEVLPPKEVVPEKKVPVPPAKKPEAPPPKVPEAPKEVVLEKKASVAVPKKPEAPRAKVPEAAQEVVPEKKIPKAPIKKPEAPAVTVPEVPQEATEKEIPVAPPKKPEAPIVPVPEAQEVVPEKKVPKAPPTKPEAPPATVPEVPQEIVPEKKTLVLPKKPEVPPVTVPEAPKEVVLEKKVPSAPPKKPEVPPVKVPEAPKEVVPEKKVPVPPPKKPEVPPTKVPEVPKAAVPEKKVPEAIPPKPESPPPEVPEVLPPKEVVPEKKVPVPPAKKPEAPPPKVPEAPKEVVLEKKASVAVPKKPEAPRAKVPEAAQEVVPEKKIPKAPIKKPEAPAVTVPEVPQEAAEKEIPVAPPKKPEAPIVPVPEAQEVVPEKKVPKAPPTKPEAPPATVPEVPQEIVPEKKTLVLPKKPEVPPVTVPEAPKEVVLEKKVPSTPPKKPEVPPVKVPEAPKEVVPEKKVPVPPPKKPEVPPTKVPEVPKAAVPEKKVPEAIPPKPESPPPEVPEVLPPKEVVPEKKVPVPPAKKPEAPPPKVPEAPKEVVLEKKVSVAVPKKPEAPRAKVPEAAQEVVPEKKIPKAPIKKPEAPAVTVPEVPQEAAEKEIPVAPPKKPEAPIVPVPEAQEVVPEKKVPKAPPTKPEAPPATVPEVPQEIVPEKKTLVLPKKPEVPPVTVPEAPKEVVLEKKVPLAPPKKPEVPPVKVPEAPKEVVPEKKVPVTPPKKPEVPPVKVPEAPIEVVPEKKMPLAPPKKPEVPPVKVPEAPKEVVPEKKVPSAPPKKPEVPPVKVPEAPKEVVPEKKVPAAPPKKPEVTPVKVPEAPKEVVPEKKVPVPPPKKPEVPPTKVPEVPKVAVPEKKVPEAIPPKPESPPPEVFEEPEEVALEEPPAEVVEEPEPAAPPQVTVPPKKPVPEKKAPAVVAKKPELPPVKVPEVPKEVVPEKKVPLVVPKKPEAPPAKVPEVPKEVVPEKKVAVPKKPEVPPAKVPEVPKKPVLEEKPAVPVPERAESPPPEVYEEPEEIAPEEEIAPEEEKPVPVAEEEEPEVPPPAVPEEPKKIIPEKKVPVIKKPEAPPPKEPEMPKKVVPVKKVPTVKKPETPAAKVPEVPKKLVPVKKEPVPVTKKPEVLPEKVPKVPEKIIPEKEVSVPIPAEPEVPPAEVEETPEEIIYEEKASITIGRKETPPVEEREIEKYIKPEEPEPEPQPEEIPVKEPEPEKVIEKPKLKPRPPPPPPAPPKEDVKEKIFQLKAIPKKKVPEKPQVPEKVELTPLKVPGGEKKVRKLLPERKPEPKEEVVLKSVLRKRPEEEEPKVEPKKLEKVKKPAVPEPPPPKPVEEVEVPTVTKRERKIPEPTKVPEIKPAIPLPAPEPKPKPEAEVKTIKPPPVEPEPTPIAAPVTVPVVGKKAEAKAPKEEAAKPKGPIKGVPKKTPSPIEAERRKLRPGSGGEKPPDEAPFTYQLKAVPLKFVKEIKDIILTESEFVGSSAIFECLVSPSTAITTWMKDGSNIRESPKHRFIADGKDRKLHIIDVQLSDAGEYTCVLRLGNKEKTSTAKLVVEELPVRFVKTLEEEVTVVKGQPLYLSCELNKERDVVWRKDGKIVVEKPGRIVPGVIGLMRALTINDADDTDAGTYTVTVENANNLECSSCVKVVEVIRDWLVKPIRDQHVKPKGTAIFACDIAKDTPNIKWFKGYDEIPAEPNDKTEILRDGNHLYLKIKNAMPEDIAEYAVEIEGKRYPAKLTLGEREVELLKPIEDVTIYEKESASFDAEISEADIPGQWKLKGELLRPSPTCEIKAEGGKRFLTLHKVKLDQAGEVLYQALNAITTAILTVKEIELDFAVPLKDVTVPERRQARFECVLTREANVIWSKGPDIIKSSDKFDIIADGKKHILVINDSQFDDEGVYTAEVEGKKTSARLFVTGIRLKFMSPLEDQTVKEGETATFVCELSHEKMHVVWFKNDAKLHTSRTVLISSEGKTHKLEMKEVTLDDISQIKAQVKELSSTAQLKVLEADPYFTVKLHDKTAVEKDEITLKCEVSKDVPVKWFKDGEEIVPSPKYSIKADGLRRILKIKKADLKDKGEYVCDCGTDKTKANVTVEARLIKVEKPLYGVEVFVGETAHFEIELSEPDVHGQWKLKGQPLTASPDCEIIEDGKKHILILHNCQLGMTGEVSFQAANAKSAANLKVKELPLIFITPLSDVKVFEKDEAKFECEVSREPKTFRWLKGTQEITGDDRFELIKDGTKHSMVIKSAAFEDEAKYMFEAEDKHTSGKLIIEGIRLKFLTPLKDVTAKEKESAVFTVELSHDNIRVKWFKNDQRLHTTRSVSMQDEGKTHSITFKDLSIDDTSQIRVEAMGMSSEAKLTVLEGDPYFTGKLQDYTGVEKDEVILQCEISKADAPVKWFKDGKEIKPSKNAVIKADGKKRMLILKKALKSDIGQYTCDCGTDKTSGKLDIEDREIKLVRPLHSVEVMETETARFETEISEDDIHANWKLKGEALLQTPDCEIKEEGKIHSLVLHNCRLDQTGGVDFQAANVKSSAHLRVKPRVIGLLRPLKDVTVTAGETATFDCELSYEDIPVEWYLKGKKLEPSDKVVPRSEGKVHTLTLRDVKLEDAGEVQLTAKDFKTHANLFVKEPPVEFTKPLEDQTVEEGATAVLECEVSRENAKVKWFKNGTEILKSKKYEIVADGRVRKLVIHDCTPEDIKTYTCDAKDFKTSCNLNVVPPHVEFLRPLTDLQVREKEMARFECELSRENAKVKWFKDGAEIKKGKKYDIISKGAVRILVINKCLLDDEAEYSCEVRTARTSGMLTVLEEEAVFTKNLANIEVSETDTIKLVCEVSKPGAEVIWYKGDEEIIETGRYEILTEGRKRILVIQNAHLEDAGNYNCRLPSSRTDGKVKVHELAAEFISKPQNLEILEGEKAEFVCSISKESFPVQWKRDDKTLESGDKYDVIADGKKRVLVVKDATLQDMGTYVVMVGAARAAAHLTVIEKLRIVVPLKDTRVKEQQEVVFNCEVNTEGAKAKWFRNEEAIFDSSKYIILQKDLVYTLRIRDAHLDDQANYNVSLTNHRGENVKSAANLIVEEEDLRIVEPLKDIETMEKKSVTFWCKVNRLNVTLKWTKNGEEVPFDNRVSYRVDKYKHMLTIKDCGFPDEGEYIVTAGQDKSVAELLIIEAPTEFVEHLEDQTVTEFDDAVFSCQLSREKANVKWYRNGREIKEGKKYKFEKDGSIHRLIIKDCRLDDECEYACGVEDRKSRARLFVEEIPVEIIRPPQDILEAPGADVVFLAELNKDKVEVQWLRNNMVVVQGDKHQMMSEGKIHRLQICDIKPRDQGEYRFIAKDKEARAKLELAAAPKIKTADQDLVVDVGKPLTMVVPYDAYPKAEAEWFKENEPLSTKTIDTTAEQTSFRILEAKKGDKGRYKIVLQNKHGKAEGFINLKVIDVPGPVRNLEVTETFDGEVSLAWEEPLTDGGSKIIGYVVERRDIKRKTWVLATDRAESCEFTVTGLQKGGVEYLFRVSARNRVGTGEPVETDNPVEARSKYDVPGPPLNVTITDVNRFGVSLTWEPPEYDGGAEITNYVIELRDKTSIRWDTAMTVRAEDLSATVTDVVEGQEYSFRVRAQNRIGVGKPSAATPFVKVADPIERPSPPVNLTSSDQTQSSVQLKWEPPLKDGGSPILGYIIERCEEGKDNWIRCNMKLVPELTYKVTGLEKGNKYLYRVSAENKAGVSDPSEILGPLTADDAFVEPTMDLSAFKDGLEVIVPNPITILVPSTGYPRPTATWCFGDKVLETGDRVKMKTLSAYAELVISPSERSDKGIYTLKLENRVKTISGEIDVNVIARPSAPKELKFGDITKDSVHLTWEPPDDDGGSPLTGYVVEKREVSRKTWTKVMDFVTDLEFTVPDLVQGKEYLFKVCARNKCGPGEPAYVDEPVNMSTPATVPDPPENVKWRDRTANSIFLTWDPPKNDGGSRIKGYIVERCPRGSDKWVACGEPVAETKMEVTGLEEGKWYAYRVKALNRQGASKPSRPTEEIQAVDTQEAPEIFLDVKLLAGLTVKAGTKIELPATVTGKPEPKITWTKADMILKQDKRITIENVPKKSTVTIVDSKRSDTGTYIIEAVNVCGRATAVVEVNVLDKPGPPAAFDITDVTNESCLLTWNPPRDDGGSKITNYVVERRATDSEVWHKLSSTVKDTNFKATKLIPNKEYIFRVAAENMYGVGEPVQASPITAKYQFDPPGPPTRLEPSDITKDAVTLTWCEPDDDGGSPITGYWVERLDPDTDKWVRCNKMPVKDTTYRVKGLTNKKKYRFRVLAENLAGPGKPSKSTEPILIKDPIDPPWPPGKPTVKDVGKTSVRLNWTKPEHDGGAKIESYVIEMLKTGTDEWVRVAEGVPTTQHLLPGLMEGQEYSFRVRAVNKAGESEPSEPSDPVLCREKLYPPSPPRWLEVINITKNTADLKWTVPEKDGGSPITNYIVEKRDVRRKGWQTVDTTVKDTKCTVTPLTEGSLYVFRVAAENAIGQSDYTEIEDSVLAKDTFTTPGPPYALAVVDVTKRHVDLKWEPPKNDGGRPIQRYVIEKKERLGTRWVKAGKTAGPDCNFRVTDVIEGTEVQFQVRAENEAGVGHPSEPTEILSIEDPTSPPSPPLDLHVTDAGRKHIAIAWKPPEKNGGSPIIGYHVEMCPVGTEKWMRVNSRPIKDLKFKVEEGVVPDKEYVLRVRAVNAIGVSEPSEISENVVAKDPDCKPTIDLETHDIIVIEGEKLSIPVPFRAVPVPTVSWHKDGKEVKASDRLTMKNDHISAHLEVPKSVRADAGIYTITLENKLGSATASINVKVIGLPGPCKDIKASDITKSSCKLTWEPPEFDGGTPILHYVLERREAGRRTYIPVMSGENKLSWTVKDLIPNGEYFFRVKAVNKVGGGEYIELKNPVIAQDPKQPPDPPVDVEVHNPTAEAMTITWKPPLYDGGSKIMGYIIEKIAKGEERWKRCNEHLVPILTYTAKGLEEGKEYQFRVRAENAAGISEPSRATPPTKAVDPIDAPKVILRTSLEVKRGDEIALDASISGSPYPTITWIKDENVIVPEEIKKRAAPLVRRRKGEVQEEEPFVLPLTQRLSIDNSKKGESQLRVRDSLRPDHGLYMIKVENDHGIAKAPCTVSVLDTPGPPINFVFEDIRKTSVLCKWEPPLDDGGSEIINYTLEKKDKTKPDSEWIVVTSTLRHCKYSVTKLIEGKEYLFRVRAENRFGPGPPCVSKPLVAKDPFGPPDAPDKPIVEDVTSNSMLVKWNEPKDNGSPILGYWLEKREVNSTHWSRVNKSLLNALKANVDGLLEGLTYVFRVCAENAAGPGKFSPPSDPKTAHDPISPPGPPIPRVTDTSSTTIELEWEPPAFNGGGEIVGYFVDKQLVGTNEWSRCTEKMIKVRQYTVKEIREGADYKLRVSAVNAAGEGPPGETQPVTVAEPQEPPAVELDVSVKGGIQIMAGKTLRIPAVVTGRPVPTKVWTKEEGELDKDRVVIDNVGTKSELIIKDALRKDHGRYVITATNSCGSKFAAARVEVFDVPGPVLDLKPVVTNRKMCLLNWSDPEDDGGSEITGFIIERKDAKMHTWRQPIETERSKCDITGLLEGQEYKFRVIAKNKFGCGPPVEIGPILAVDPLGPPTSPERLTYTERTKSTITLDWKEPRSNGGSPIQGYIIEKRRHDKPDFERVNKRLCPTTSFLVENLDEHQMYEFRVKAVNEIGESEPSLPLNVVIQDDEVPPTIKLRLSVRGDTIKVKAGEPVHIPADVTGLPMPKIEWSKNETVIEKPTDALQITKEEVSRSEAKTELSIPKAVREDKGTYTVTASNRLGSVFRNVHVEVYDRPSPPRNLAVTDIKAESCYLTWDAPLDNGGSEITHYVIDKRDASRKKAEWEEVTNTAVEKRYGIWKLIPNGQYEFRVRAVNKYGISDECKSDKVVIQDPYRLPGPPGKPKVLARTKGSMLVSWTPPLDNGGSPITGYWLEKREEGSPYWSRVSRAPITKVGLKGVEFNVPRLLEGVKYQFRAMAINAAGIGPPSEPSDPEVAGDPIFPPGPPSCPEVKDKTKSSISLGWKPPAKDGGSPIKGYIVEMQEEGTTDWKRVNEPDKLITTCECVVPNLKELRKYRFRVKAVNEAGESEPSDTTGEIPATDIQEEPEVFIDIGAQDCLVCKAGSQIRIPAVIKGRPTPKSSWEFDGKAKKAMKDGVHDIPEDAQLETAENSSVIIIPECKRSHTGKYSITAKNKAGQKTANCRVKVMDVPGPPKDLKVSDITRGSCRLSWKMPDDDGGDRIKGYVIEKRTIDGKAWTKVNPDCGSTTFVVPDLLSEQQYFFRVRAENRFGIGPPVETIQRTTARDPIYPPDPPIKLKIGLITKNTVHLSWKPPKNDGGSPVTHYIVECLAWDPTGTKKEAWRQCNKRDVEELQFTVEDLVEGGEYEFRVKAVNAAGVSKPSATVGPVTVKDQTCPPSIDLKEFMEVEEGTNVNIVAKIKGVPFPTLTWFKAPPKKPDNKEPVLYDTHVNKLVVDDTCTLVIPQSRRSDTGLYTITAVNNLGTASKEMRLNVLGRPGPPVGPIKFESVSADQMTLSWFPPKDDGGSKITNYVIEKREANRKTWVHVSSEPKECTYTIPKLLEGHEYVFRIMAQNKYGIGEPLDSEPETARNLFSVPGAPDKPTVSSVTRNSMTVNWEEPEYDGGSPVTGYWLEMKDTTSKRWKRVNRDPIKAMTLGVSYKVTGLIEGSDYQFRVYAINAAGVGPASLPSDPATARDPIAPPGPPFPKVTDWTKSSADLEWSPPLKDGGSKVTGYIVEYKEEGKEEWEKGKDKEVRGTKLVVTGLKEGAFYKFRVRAVNIAGIGEPGEVTDVIEMKDRLVSPDLQLDASVRDRIVVHAGGVIRIIAYVSGKPPPTVTWNMNERTLPQEATIETTAISSSMVIKNCQRSHQGVYSLLAKNEAGERKKTIIVDVLDVPGPVGTPFLAHNLTNESCKLTWFSPEDDGGSPITNYVIEKRESDRRAWTPVTYTVTRQNATVQGLIQGKAYFFRIAAENSIGMGPFVETSEALVIREPITVPERPEDLEVKEVTKNTVTLTWNPPKYDGGSEIINYVLESRLIGTEKFHKVTNDNLLSRKYTVKGLKEGDTYEYRVSAVNIVGQGKPSFCTKPITCKDELAPPTLHLDFRDKLTIRVGEAFALTGRYSGKPKPKVSWFKDEADVLEDDRTHIKTTPATLALEKIKAKRSDSGKYCVVVENSTGSRKGFCQVNVVDRPGPPVGPVSFDEVTKDYMVISWKPPLDDGGSKITNYIIEKKEVGKDVWMPVTSASAKTTCKVSKLLEGKDYIFRIHAENLYGISDPLVSDSMKAKDRFRVPDAPDQPIVTEVTKDSALVTWNKPHDGGKPITNYILEKRETMSKRWARVTKDPIHPYTKFRVPDLLEGCQYEFRVSAENEIGIGDPSPPSKPVFAKDPIAKPSPPVNPEAIDTTCNSVDLTWQPPRHDGGSKILGYIVEYQKVGDEEWRRANHTPESCPETKYKVTGLRDGQTYKFRVLAVNAAGESDPAHVPEPVLVKDRLEPPELILDANMAREQHIKVGDTLRLSAIIKGVPFPKVTWKKEDRDAPTKARIDVTPVGSKLEIRNAAHEDGGIYSLTVENPAGSKTVSVKVLVLDKPGPPRDLEVSEIRKDSCYLTWKEPLDDGGSVITNYVVERRDVASAQWSPLSATSKKKSHFAKHLNEGNQYLFRVAAENQYGRGPFVETPKPIKALDPLHPPGPPKDLHHVDVDKTEVSLVWNKPDRDGGSPITGYLVEYQEEGTQDWIKFKTVTNLECVVTGLQQGKTYRFRVKAENIVGLGLPDTTIPIECQEKLVPPSVELDVKLIEGLVVKAGTTVRFPAIIRGVPVPTAKWTTDGSEIKTDEHYTVETDNFSSVLTIKNCLRRDTGEYQITVSNAAGSKTVAVHLTVLDVPGPPTGPINILDVTPEHMTISWQPPKDDGGSPVINYIVEKQDTRKDTWGVVSSGSSKTKLKIPHLQKGCEYVFRVRAENKIGVGPPLDSTPTVAKHKFSPPSPPGKPVVTDITENAATVSWTLPKSDGGSPITGYYMERREVTGKWVRVNKTPIADLKFRVTGLYEGNTYEFRVFAENLAGLSKPSPSSDPIKACRPIKPPGPPINPKLKDKSRETADLVWTKPLSDGGSPILGYVVECQKPGTAQWNRINKDELIRQCAFRVPGLIEGNEYRFRIKAANIVGEGEPRELAESVIAKDILHPPEVELDVTCRDVITVRVGQTIRILARVKGRPEPDITWTKEGKVLVREKRVDLIQDLPRVELQIKEAVRADHGKYIISAKNSSGHAQGSAIVNVLDRPGPCQNLKVTNVTKENCTISWENPLDNGGSEITNFIVEYRKPNQKGWSIVASDVTKRLIKANLLANNEYYFRVCAENKVGVGPTIETKTPILAINPIDRPGEPENLHIADKGKTFVYLKWRRPDYDGGSPNLSYHVERRLKGSDDWERVHKGSIKETHYMVDRCVENQIYEFRVQTKNEGGESDWVKTEEVVVKEDLQKPVLDLKLSGVLTVKAGDTIRLEAGVRGKPFPEVAWTKDKDATDLTRSPRVKIDTRADSSKFSLTKAKRSDGGKYVVTATNTAGSFVAYATVNVLDKPGPVRNLKIVDVSSDRCTVCWDPPEDDGGCEIQNYILEKCETKRMVWSTYSATVLTPGTTVTRLIEGNEYIFRVRAENKIGTGPPTESKPVIAKTKYDKPGRPDPPEVTKVSKEEMTVVWNPPEYDGGKSITGYFLEKKEKHSTRWVPVNKSAIPERRMKVQNLLPDHEYQFRVKAENEIGIGEPSLPSRPVVAKDPIEPPGPPTNFRVVDTTKHSITLGWGKPVYDGGAPIIGYVVEMRPKIADASPDEGWKRCNAAAQLVRKEFTVTSLDENQEYEFRVCAQNQVGIGRPAELKEAIKPKEILEPPEIDLDASMRKLVIVRAGCPIRLFAIVRGRPAPKVTWRKVGIDNVVRKGQVDLVDTMAFLVIPNSTRDDSGKYSLTLVNPAGEKAVFVNVRVLDTPGPVSDLKVSDVTKTSCHVSWAPPENDGGSQVTHYIVEKREADRKTWSTVTPEVKKTSFHVTNLVPGNEYYFRVTAVNEYGPGVPTDVPKPVLASDPLSEPDPPRKLEVTEMTKNSATLAWLPPLRDGGAKIDGYITSYREEEQPADRWTEYSVVKDLSLVVTGLKEGKKYKFRVAARNAVGVSLPREAEGVYEAKEQLLPPKILMPEQITIKAGKKLRIEAHVYGKPHPTCKWKKGEDEVVTSSHLAVHKADSSSILIIKDVTRKDSGYYSLTAENSSGTDTQKIKVVVMDAPGPPQPPFDISDIDADACSLSWHIPLEDGGSNITNYIVEKCDVSRGDWVTALASVTKTSCRVGKLIPGQEYIFRVRAENRFGISEPLTSPKMVAQFPFGVPSEPKNARVTKVNKDCIFVAWDRPDSDGGSPIIGYLIERKERNSLLWVKANDTLVRSTEYPCAGLVEGLEYSFRIYALNKAGSSPPSKPTEYVTARMPVDPPGKPEVIDVTKSTVSLIWARPKHDGGSKIIGYFVEACKLPGDKWVRCNTAPHQIPQEEYTATGLEEKAQYQFRAIARTAVNISPPSEPSDPVTILAENVPPRIDLSVAMKSLLTVKAGTNVCLDATVFGKPMPTVSWKKDGTLLKPAEGIKMAMQRNLCTLELFSVNRKDSGDYTITAENSSGSKSATIKLKVLDKPGPPASVKINKMYSDRAMLSWEPPLEDGGSEITNYIVDKRETSRPNWAQVSATVPITSCSVEKLIEGHEYQFRICAENKYGVGDPVFTEPAIAKNPYDPPGRCDPPVISNITKDHMTVSWKPPADDGGSPITGYLLEKRETQAVNWTKVNRKPIIERTLKATGLQEGTEYEFRVTAINKAGPGKPSDASKAAYARDPQYPPGPPAFPKVYDTTRSSVSLSWGKPAYDGGSPIIGYLVEVKRADSDNWVRCNLPQNLQKTRFEVTGLMEDTQYQFRVYAVNKIGYSDPSDVPDKHYPKDILIPPEGELDADLRKTLILRAGVTMRLYVPVKGRPPPKITWSKPNVNLRDRIGLDIKSTDFDTFLRCENVNKYDAGKYILTLENSCGKKEYTIVVKVLDTPGPPVNVTVKEISKDSAYVTWEPPIIDGGSPIINYVVQKRDAERKSWSTVTTECSKTSFRVANLEEGKSYFFRVFAENEYGIGDPGETRDAVKASQTPGPVVDLKVRSVSKSSCSIGWKKPHSDGGSRIIGYVVDFLTEENKWQRVMKSLSLQYSAKDLTEGKEYTFRVSAENENGEGTPSEITVVARDDVVAPDLDLKGLPDLCYLAKENSNFRLKIPIKGKPAPSVSWKKGEDPLATDTRVSVESSAVNTTLIVYDCQKSDAGKYTITLKNVAGTKEGTISIKVVGKPGIPTGPIKFDEVTAEAMTLKWAPPKDDGGSEITNYILEKRDSVNNKWVTCASAVQKTTFRVTRLHEGMEYTFRVSAENKYGVGEGLKSEPIVARHPFDVPDAPPPPNIVDVRHDSVSLTWTDPKKTGGSPITGYHLEFKERNSLLWKRANKTPIRMRDFKVTGLTEGLEYEFRVMAINLAGVGKPSLPSEPVVALDPIDPPGKPEVINITRNSVTLIWTEPKYDGGHKLTGYIVEKRDLPSKSWMKANHVNVPECAFTVTDLVEGGKYEFRIRAKNTAGAISAPSESTETIICKDEYEAPTIVLDPTIKDGLTIKAGDTIVLNAISILGKPLPKSSWSKAGKDIRPSDITQITSTPTSSMLTIKYATRKDAGEYTITATNPFGTKVEHVKVTVLDVPGPPGPVEISNVSAEKATLTWTPPLEDGGSPIKSYILEKRETSRLLWTVVSEDIQSCRHVATKLIQGNEYIFRVSAVNHYGKGEPVQSEPVKMVDRFGPPGPPEKPEVSNVTKNTATVSWKRPVDDGGSEITGYHVERREKKSLRWVRAIKTPVSDLRCKVTGLQEGSTYEFRVSAENRAGIGPPSEASDSVLMKDAAYPPGPPSNPHVTDTTKKSASLAWGKPHYDGGLEITGYVVEHQKVGDEAWIKDTTGTALRITQFVVPDLQTKEKYNFRISAINDAGVGEPAVIPDVEIVEREMAPDFELDAELRRTLVVRAGLSIRIFVPIKGRPAPEVTWTKDNINLKNRANIENTESFTLLIIPECNRYDTGKFVMTIENPAGKKSGFVNVRVLDTPGPVLNLRPTDITKDSVTLHWDLPLIDGGSRITNYIVEKREATRKSYSTATTKCHKCTYKVTGLSEGCEYFFRVMAENEYGIGEPTETTEPVKASEAPSPPDSLNIMDITKSTVSLAWPKPKHDGGSKITGYVIEAQRKGSDQWTHITTVKGLECVVRNLTEGEEYTFQVMAVNSAGRSAPRESRPVIVKEQTMLPELDLRGIYQKLVIAKAGDNIKVEIPVLGRPKPTVTWKKGDQILKQTQRVNFETTATSTILNINECVRSDSGPYPLTARNIVGEVGDVITIQVHDIPGPPTGPIKFDEVSSDFVTFSWDPPENDGGVPISNYVVEMRQTDSTTWVELATTVIRTTYKATRLTTGLEYQFRVKAQNRYGVGPGITSACIVANYPFKVPGPPGTPQVTAVTKDSMTISWHEPLSDGGSPILGYHVERKERNGILWQTVSKALVPGNIFKSSGLTDGIAYEFRVIAENMAGKSKPSKPSEPMLALDPIDPPGKPVPLNITRHTVTLKWAKPEYTGGFKITSYIVEKRDLPNGRWLKANFSNILENEFTVSGLTEDAAYEFRVIAKNAAGAISPPSEPSDAITCRDDVEAPKIKVDVKFKDTVILKAGEAFRLEADVSGRPPPTMEWSKDGKELEGTAKLEIKIADFSTNLVNKDSTRRDSGAYTLTATNPGGFAKHIFNVKVLDRPGPPEGPLAVTEVTSEKCVLSWFPPLDDGGAKIDHYIVQKRETSRLAWTNVASEVQVTKLKVTKLLKGNEYIFRVMAVNKYGVGEPLESEPVLAVNPYGPPDPPKNPEVTTITKDSMVVCWGHPDSDGGSEIINYIVERRDKAGQRWIKCNKKTLTDLRYKVSGLTEGHEYEFRIMAENAAGISAPSPTSPFYKACDTVFKPGPPGNPRVLDTSRSSISIAWNKPIYDGGSEITGYMVEIALPEEDEWQIVTPPAGLKATSYTITGLTENQEYKIRIYAMNSEGLGEPALVPGTPKAEDRMLPPEIELDADLRKVVTIRACCTLRLFVPIKGRPAPEVKWARDHGESLDKASIESTSSYTLLIVGNVNRFDSGKYILTVENSSGSKSAFVNVRVLDTPGPPQDLKVKEVTKTSVTLTWDPPLLDGGSKIKNYIVEKRESTRKAYSTVATNCHKTSWKVDQLQEGCSYYFRVLAENEYGIGLPAETAESVKASERPLPPGKITLMDVTRNSVSLSWEKPEHDGGSRILGYIVEMQTKGSDKWATCATVKVTEATITGLIQGEEYSFRVSAQNEKGISDPRQLSVPVIAKDLVIPPAFKLLFNTFTVLAGEDLKVDVPFIGRPTPAVTWHKDNVPLKQTTRVNAESTENNSLLTIKDACREDVGHYVVKLTNSAGEAIETLNVIVLDKPGPPTGPVKMDEVTADSITLSWGPPKYDGGSSINNYIVEKRDTSTTTWQIVSATVARTTIKACRLKTGCEYQFRIAAENRYGKSTYLNSEPTVAQYPFKVPGPPGTPVVTLSSRDSMEVQWNEPISDGGSRVIGYHLERKERNSILWVKLNKTPIPQTKFKTTGLEEGVEYEFRVSAENIVGIGKPSKVSECYVARDPCDPPGRPEAIIVTRNSVTLQWKKPTYDGGSKITGYIVEKKELPEGRWMKASFTNIIDTHFEVTGLVEDHRYEFRVIARNAAGVFSEPSESTGAITARDEVDPPRISMDPKYKDTIVVHAGESFKVDADIYGKPIPTIQWIKGDQELSNTARLEIKSTDFATSLSVKDAVRVDSGNYILKAKNVAGERSVTVNVKVLDRPGPPEGPVVISGVTAEKCTLAWKPPLQDGGSDIINYIVERRETSRLVWTVVDANVQTLSCKVTKLLEGNEYTFRIMAVNKYGVGEPLESEPVVAKNPFVVPDAPKAPEVTTVTKDSMIVVWERPASDGGSEILGYVLEKRDKEGIRWTRCHKRLIGELRLRVTGLIENHDYEFRVSAENAAGLSEPSPPSAYQKACDPIYKPGPPNNPKVIDITRSSVFLSWSKPIYDGGCEIQGYIVEKCDVSVGEWTMCTPPTGINKTNIEVEKLLEKHEYNFRICAINKAGVGEHADVPGPIIVEEKLEAPDIDLDLELRKIINIRAGGSLRLFVPIKGRPTPEVKWGKVDGEIRDAAIIDVTSSFTSLVLDNVNRYDSGKYTLTLENSSGTKSAFVTVRVLDTPSPPVNLKVTEITKDSVSITWEPPLLDGGSKIKNYIVEKREATRKSYAAVVTNCHKNSWKIDQLQEGCSYYFRVTAENEYGIGLPAQTADPIKVAEVPQPPGKITVDDVTRNSVSLSWTKPEHDGGSKIIQYIVEMQAKHSEKWSECARVKSLQAVITNLTQGEEYLFRVVAVNEKGRSDPRSLAVPIVAKDLVIEPDVKPAFSSYSVQVGQDLKIEVPISGRPKPTITWTKDGLPLKQTTRINVTDSLDLTTLSIKETHKDDGGQYGITVANVVGQKTASIEIVTLDKPDPPKGPVKFDDVSAESITLSWNPPLYTGGCQITNYIVQKRDTTTTVWDVVSATVARTTLKVTKLKTGTEYQFRIFAENRYGQSFALESDPIVAQYPYKEPGPPGTPFATAISKDSMVIQWHEPVNNGGSPVIGYHLERKERNSILWTKVNKTIIHDTQFKAQNLEEGIEYEFRVYAENIVGVGKASKNSECYVARDPCDPPGTPEPIMVKRNEITLQWTKPVYDGGSMITGYIVEKRDLPDGRWMKASFTNVIETQFTVSGLTEDQRYEFRVIAKNAAGAISKPSDSTGPITAKDEVELPRISMDPKFRDTIVVNAGETFRLEADVHGKPLPTIEWLRGDKEIEESARCEIKNTDFKALLIVKDAIRIDGGQYILRASNVAGSKSFPVNVKVLDRPGPPEGPVQVTGVTSEKCSLTWSPPLQDGGSDISHYVVEKRETSRLAWTVVASEVVTNSLKVTKLLEGNEYVFRIMAVNKYGVGEPLESAPVLMKNPFVLPGPPKSLEVTNIAKDSMTVCWNRPDSDGGSEIIGYIVEKRDRSGIRWIKCNKRRITDLRLRVTGLTEDHEYEFRVSAENAAGVGEPSPATVYYKACDPVFKPGPPTNAHIVDTTKNSITLAWGKPIYDGGSEILGYVVEICKADEEEWQIVTPQTGLRVTRFEISKLTEHQEYKIRVCALNKVGLGEATSVPGTVKPEDKLEAPELDLDSELRKGIVVRAGGSARIHIPFKGRPTPEITWSREEGEFTDKVQIEKGVNYTQLSIDNCDRNDAGKYILKLENSSGSKSAFVTVKVLDTPGPPQNLAVKEVRKDSAFLVWEPPIIDGGAKVKNYVIDKRESTRKAYANVSSKCSKTSFKVENLTEGAIYYFRVMAENEFGVGVPVETVDAVKAAEPPSPPGKVTLTDVSQTSASLMWEKPEHDGGSRVLGYVVEMQPKGTEKWSIVAESKVCNAVVTGLSSGQEYQFRVKAYNEKGKSDPRVLGVPVIAKDLTIQPSLKLPFNTYSIQAGEDLKIEIPVIGRPRPNISWVKDGEPLKQTTRVNVEETATSTVLHIKEGNKDDFGKYTVTATNSAGTATENLSVIVLEKPGPPVGPVRFDEVSADFVVISWEPPAYTGGCQISNYIVEKRDTTTTTWHMVSATVARTTIKITKLKTGTEYQFRIFAENRYGKSAPLDSKAVIVQYPFKEPGPPGTPFVTSISKDQMLVQWHEPVNDGGTKIIGYHLEQKEKNSILWVKLNKTPIQDTKFKTTGLDEGLEYEFKVSAENIVGIGKPSKVSECFVARDPCDPPGRPEAIVITRNNVTLKWKKPAYDGGSKITGYIVEKKDLPDGRWMKASFTNVLETEFTVSGLVEDQRYEFRVIARNAAGNFSEPSDSSGAITARDEIDAPNASLDPKYKDVIVVHAGETFVLEADIRGKPIPDVVWSKDGKELEETAARMEIKSTIQKTTLVVKDCIRTDGGQYILKLSNVGGTKSIPITVKVLDRPGPPEGPLKVTGVTAEKCYLAWNPPLQDGGANISHYIIEKRETSRLSWTQVSTEVQALNYKVTKLLPGNEYIFRVMAVNKYGIGEPLESGPVTACNPYKPPGPPSTPEVSAITKDSMVVTWARPVDDGGTEIEGYILEKRDKEGVRWTKCNKKTLTDLRLRVTGLTEGHSYEFRVAAENAAGVGEPSEPSVFYRACDALYPPGPPSNPKVTDTSRSSVSLAWSKPIYDGGAPVKGYVVEVKEAAADEWTTCTPPTGLQGKQFTVTKLKENTEYNFRICAINSEGVGEPATLPGSVVAQERIEPPEIELDADLRKVVVLRASATLRLFVTIKGRPEPEVKWEKAEGILTDRAQIEVTSSFTMLVIDNVTRFDSGRYNLTLENNSGSKTAFVNVRVLDSPSAPVNLTIREVKKDSVTLSWEPPLIDGGAKITNYIVEKRETTRKAYATITNNCTKTTFRIENLQEGCSYYFRVLASNEYGIGLPAETTEPVKVSEPPLPPGRVTLVDVTRNTATIKWEKPESDGGSKITGYVVEMQTKGSEKWSTCTQVKTLEATISGLTAGEEYVFRVAAVNEKGRSDPRQLGVPVIARDIEIKPSVELPFHTFNVKAREQLKIDVPFKGRPQATVNWRKDGQTLKETTRVNVSSSKTVTSLSIKEASKEDVGTYELCVSNSAGSITVPITIIVLDRPGPPGPIRIDEVSCDSITISWNPPEYDGGCQISNYIVEKKETTSTTWHIVSQAVARTSIKIVRLTTGSEYQFRVCAENRYGKSSYSESSAVVAEYPFSPPGPPGTPKVVHATKSTMLVTWQVPVNDGGSRVIGYHLEYKERSSILWSKANKILIADTQMKVSGLDEGLMYEYRVYAENIAGIGKCSKSCEPVPARDPCDPPGQPEVTNITRKSVSLKWSKPHYDGGAKITGYIVERRELPDGRWLKCNYTNIQETYFEVTELTEDQRYEFRVFARNAADSVSEPSESTGPIIVKDDVEPPRVMMDVKFRDVIVVKAGEVLKINADIAGRPLPVISWAKDGIEIEERARTEIISTDNHTLLTVKDCIRRDTGQYVLTLKNVAGTRSVAVNCKVLDKPGPPAGPLEINGLTAEKCSLSWGRPQEDGGADIDYYIVEKRETSHLAWTICEGELQMTSCKVTKLLKGNEYIFRVTGVNKYGVGEPLESVAIKALDPFTVPSPPTSLEITSVTKESMTLCWSRPESDGGSEISGYIIERREKNSLRWVRVNKKPVYDLRVKSTGLREGCEYEYRVYAENAAGLSLPSETSPLIRAEDPVFLPSPPSKPKIVDSGKTTITIAWVKPLFDGGAPITGYTVEYKKSDDTDWKTSIQSLRGTEYTISGLTTGAEYVFRVKSVNKVGASDPSDSSDPQIAKEREEEPLFDIDSEMRKTLIVKAGASFTMTVPFRGRPVPNVLWSKPDTDLRTRAYVDTTDSRTSLTIENANRNDSGKYTLTIQNVLSAASLTLVVKVLDTPGPPTNITVQDVTKESAVLSWDVPENDGGAPVKNYHIEKREASKKAWVSVTNNCNRLSYKVTNLQEGAIYYFRVSGENEFGVGIPAETKEGVKITEKPSPPEKLGVTSISKDSVSLTWLKPEHDGGSRIVHYVVEALEKGQKNWVKCAVAKSTHHVVSGLRENSEYFFRVFAENQAGLSDPRELLLPVLIKEQLEPPEIDMKNFPSHTVYVRAGSNLKVDIPISGKPLPKVTLSRDGVPLKATMRFNTEITAENLTINLKESVTADAGRYEITAANSSGTTKAFINIVVLDRPGPPTGPVVISDITEESVTLKWEPPKYDGGSQVTNYILLKRETSTAVWTEVSATVARTMMKVMKLTTGEEYQFRIKAENRFGISDHIDSACVTVKLPYTTPGPPSTPWVTNVTRESITVGWHEPVSNGGSAVVGYHLEMKDRNSILWQKANKLVIRTTHFKVTTISAGLIYEFRVYAENAAGVGKPSHPSEPVLAIDACEPPRNVRITDISKNSVSLSWQQPAFDGGSKITGYIVERRDLPDGRWTKASFTNVTETQFIISGLTQNSQYEFRVFARNAVGSISNPSEVVGPITCIDSYGGPVIDLPLEYTEVVKYRAGTSVKLRAGISGKPAPTIEWYKDDKELQTNALVCVENTTDLASILIKDADRLNSGCYELKLRNAMGSASATIRVQILDKPGPPGGPIEFKTVTAEKITLLWRPPADDGGAKITHYIVEKRETSRVVWSMVSEHLEECIITTTKIIKGNEYIFRVRAVNKYGIGEPLESDSVVAKNAFVTPGPPGIPEVTKITKNSMTVVWSRPIADGGSDISGYFLEKRDKKSLGWFKVLKETIRDTRQKVTGLTENSDYQYRVCAVNAAGQGPFSEPSEFYKAADPIDPPGPPAKIRIADSTKSSITLGWSKPVYDGGSAVTGYVVEIRQGEEEEWTTVSTKGEVRTTEYVVSNLKPGVNYYFRVSAVNCAGQGEPIEMNEPVQAKDILEAPEIDLDVALRTSVIAKAGEDVQVLIPFKGRPPPTVTWRKDEKNLGSDARYSIENTDSSSLLTIPQVTRNDTGKYILTIENGVGEPKSSTVSVKVLDTPAACQKLQVKHVSRGTVTLLWDPPLIDGGSPIINYVIEKRDATKRTWSVVSHKCSSTSFKLIDLSEKTPFFFRVLAENEIGIGEPCETTEPVKAAEVPAPIRDLSMKDSTKTSVILSWTKPDFDGGSVITEYVVERKGKGEQTWSHAGISKTCEIEVSQLKEQSVLEFRVFAKNEKGLSDPVTIGPITVKELIITPEVDLSDIPGAQVTVRIGHNVHLELPYKGKPKPSISWLKDGLPLKESEFVRFSKTENKITLSIKNAKKEHGGKYTVILDNAVCRIAVPITVITLGPPSKPKGPIRFDEIKADSVILSWDVPEDNGGGEITCYSIEKRETSQTNWKMVCSSVARTTFKVPNLVKDAEYQFRVRAENRYGVSQPLVSSIIVAKHQFRIPGPPGKPVIYNVTSDGMSLTWDAPVYDGGSEVTGFHVEKKERNSILWQKVNTSPISGREYRATGLVEGLDYQFRVYAENSAGLSSPSDPSKFTLAVSPVDPPGTPDYIDVTRETITLKWNPPLRDGGSKIVGYSIEKRQGNERWVRCNFTDVSECQYTVTGLSPGDRYEFRIIARNAVGTISPPSQSSGIIMTRDENVPPIVEFGPEYFDGLIIKSGESLRIKALVQGRPVPRVTWFKDGVEIEKRMNMEITDVLGSTSLFVRDATRDHRGVYTVEAKNASGSAKAEIKVKVQDTPGKVVGPIRFTNITGEKMTLWWDAPLNDGCAPITHYIIEKRETSRLAWALIEDKCEAQSYTAIKLINGNEYQFRVSAVNKFGVGRPLDSDPVVAQIQYTVPDAPGIPEPSNITGNSITLTWARPESDGGSEIQQYILERREKKSTRWVKVISKRPISETRFKVTGLTEGNEYEFHVMAENAAGVGPASGISRLIKCREPVNPPGPPTVVKVTDTSKTTVSLEWSKPVFDGGMEIIGYIIEMCKADLGDWHKVNAEACVKTRYTVTDLQAGEEYKFRVSAINGAGKGDSCEVTGTIKAVDRLTAPELDIDANFKQTHVVRAGASIRLFIAYQGRPTPTAVWSKPDSNLSLRADIHTTDSFSTLTVENCNRNDAGKYTLTVENNSGSKSITFTVKVLDTPGPPGPITFKDVTRGSATLMWDAPLLDGGARIHHYVVEKREASRRSWQVISEKCTRQIFKVNDLAEGVPYYFRVSAVNEYGVGEPYEMPEPIVATEQPAPPRRLDVVDTSKSSAVLAWLKPDHDGGSRITGYLLEMRQKGSDFWVEAGHTKQLTFTVERLVEKTEYEFRVKAKNDAGYSEPREAFSSVIIKEPQIEPTADLTGITNQLITCKAGSPFTIDVPISGRPAPKVTWKLEEMRLKETDRVSITTTKDRTTLTVKDSMRGDSGRYFLTLENTAGVKTFSVTVVVIGRPGPVTGPIEVSSVSAESCVLSWGEPKDGGGTEITNYIVEKRESGTTAWQLVNSSVKRTQIKVTHLTKYMEYSFRVSSENRFGVSKPLESAPIIAEHPFVPPSAPTRPEVYHVSANAMSIRWEEPYHDGGSKIIGYWVEKKERNTILWVKENKVPCLECNYKVTGLVEGLEYQFRTYALNAAGVSKASEASRPIMAQNPVDAPGRPEVTDVTRSTVSLIWSAPAYDGGSKVVGYIIERKPVSEVGDGRWLKCNYTIVSDNFFTVTALSEGDTYEFRVLAKNAAGVISKGSESTGPVTCRDEYAPPKAELDARLHGDLVTIRAGSDLVLDAAVGGKPEPKIIWTKGDKELDLCEKVSLQYTGKRATAVIKFCDRSDSGKYTLTVKNASGTKAVSVMVKVLDSPGPCGKLTVSRVTQEKCTLAWSLPQEDGGAEITHYIVERRETSRLNWVIVEGECPTLSYVVTRLIKNNEYIFRVRAVNKYGPGVPVESEPIVARNSFTIPSPPGIPEEVGTGKEHIIIQWTKPESDGGNEISNYLVDKREKKSLRWTRVNKDYVVYDTRLKVTSLMEGCDYQFRVTAVNAAGNSEPSEASNFISCREPSYTPGPPSAPRVVDTTKHSISLAWTKPMYDGGTDIVGYVLEMQEKDTDQWYRVHTNATIRNTEFTVPDLKMGQKYSFRVAAVNVKGMSEYSESIAEIEPVERIEIPDLELADDLKKTVTIRAGASLRLMVSVSGRPPPVITWSKQGIDLASRAIIDTTESYSLLIVDKVNRYDAGKYTIEAENQSGKKSATVLVKVYDTPGPCPSVKVKEVSRDSVTITWEIPTIDGGAPVNNYIVEKREAAMRAFKTVTTKCSKTLYRISGLVEGTMYYFRVLPENIYGIGEPCETSDAVLVSEVPLVPAKLEVVDVTKSTVTLAWEKPLYDGGSRLTGYVLEACKAGTERWMKVVTLKPTVLEHTVTSLNEGEQYLFRIRAQNEKGVSEPRETVTAVTVQDLRVLPTIDLSTMPQKTIHVPAGRPVELVIPIAGRPPPAASWFFAGSKLRESERVTVETHTKVAKLTIRETTIRDTGEYTLELKNVTGTTSETIKVIILDKPGPPTGPIKIDEIDATSITISWEPPELDGGAPLSGYVVEQRDAHRPGWLPVSESVTRSTFKFTRLTEGNEYVFRVAATNRFGIGSYLQSEVIECRSSIRIPGPPETLQIFDVSRDGMTLTWYPPEDDGGSQVTGYIVERKEVRADRWVRVNKVPVTMTRYRSTGLTEGLEYEHRVTAINARGSGKPSRPSKPIVAMDPIAPPGKPQNPRVTDTTRTSVSLAWSVPEDEGGSKVTGYLIEMQKVDQHEWTKCNTTPTKIREYTLTHLPQGAEYRFRVLACNAGGPGEPAEVPGTVKVTEMLEYPDYELDERYQEGIFVRQGGVIRLTIPIKGKPFPICKWTKEGQDISKRAMIATSETHTELVIKEADRGDSGTYDLVLENKCGKKAVYIKVRVIGSPNSPEGPLEYDDIQVRSVRVSWRPPADDGGADILGYILERREVPKAAWYTIDSRVRGTSLVVKGLKENVEYHFRVSAENQFGISKPLKSEEPVTPKTPLNPPEPPSNPPEVLDVTKSSVSLSWSRPKDDGGSRVTGYYIERKETSTDKWVRHNKTQITTTMYTVTGLVPDAEYQFRIIAQNDVGLSETSPASEPVVCKDPFDKPSQPGELEILSISKDSVTLQWEKPECDGGKEILGYWVEYRQSGDSAWKKSNKERIKDKQFTIGGLLEATEYEFRVFAENETGLSRPRRTAMSIKTKLTSGEAPGIRKEMKDVTTKLGEAAQLSCQIVGRPLPDIKWYRFGKELIQSRKYKMSSDGRTHTLTVMTEEQEDEGVYTCIATNEVGEVETSSKLLLQATPQFHPGYPLKEKYYGAVGSTLRLHVMYIGRPVPAMTWFHGQKLLQNSENITIENTEHYTHLVMKNVQRKTHAGKYKVQLSNVFGTVDAILDVEIQDKPDKPTGPIVIEALLKNSAVISWKPPADDGGSWITNYVVEKCEAKEGAEWQLVSSAISVTTCRIVNLTENAGYYFRVSAQNTFGISDPLEVSSVVIIKSPFEKPGAPGKPTITAVTKDSCVVAWKPPASDGGAKIRNYYLEKREKKQNKWISVTTEEIRETVFSVKNLIEGLEYEFRVKCENLGGESEWSEISEPITPKSDVPIQAPHFKEELRNLNVRYQSNATLVCKVTGHPKPIVKWYRQGKEIIADGLKYRIQEFKGGYHQLIIASVTDDDATVYQVRATNQGGSVSGTASLEVEVPAKIHLPKTLEGMGAVHALRGEVVSIKIPFSGKPDPVITWQKGQDLIDNNGHYQVIVTRSFTSLVFPNGVERKDAGFYVVCAKNRFGIDQKTVELDVADVPDPPRGVKVSDVSRDSVNLTWTEPASDGGSKITNYIVEKCATTAERWLRVGQARETRYTVINLFGKTSYQFRVIAENKFGLSKPSEPSEPTITKEDKTRAMNYDEEVDETREVSMTKASHSSTKELYEKYMIAEDLGRGEFGIVHRCVETSSKKTYMAKFVKVKGTDQVLVKKEISILNIARHRNILHLHESFESMEELVMIFEFISGLDIFERINTSAFELNEREIVSYVHQVCEALQFLHSHNIGHFDIRPENIIYQTRRSSTIKIIEFGQARQLKPGDNFRLLFTAPEYYAPEVHQHDVVSTATDMWSLGTLVYVLLSGINPFLAETNQQIIENIMNAEYTFDEEAFKEISIEAMDFVDRLLVKERKSRMTASEALQHPWLKQKIERVSTKVIRTLKHRRYYHTLIKKDLNMVVSAARISCGGAIRSQKGVSVAKVKVASIEIGPVSGQIMHAVGEEGGHVKYVCKIENYDQSTQVTWYFGVRQLENSEKYEITYEDGVAILYVKDITKLDDGTYRCKVVNDYGEDSSYAELFVKGVREVYDYYCRRTMKKIKRRTDTMRLLERPPEFTLPLYNKTAYVGENVRFGVTITVHPEPHVTWYKSGQKIKPGDNDKKYTFESDKGLYQLTINSVTTDDDAEYTVVARNKYGEDSCKAKLTVTLHPPPTDSTLRPMFKRLLANAECQEGQSVCFEIRVSGIPPPTLKWEKDGQPLSLGPNIEIIHEGLDYYALHIRDTLPEDTGYYRVTATNTAGSTSCQAHLQVERLRYKKQEFKSKEEHERHVQKQIDKTLRMAEILSGTESVPLTQVAKEALREAAVLYKPAVSTKTVKGEFRLEIEEKKEERKLRMPYDVPEPRKYKQTTIEEDQRIKQFVPMSDMKWYKKIRDQYEMPGKLDRVVQKRPKRIRLSRWEQFYVMPLPRITDQYRPKWRIPKLSQDDLEIVRPARRRTPSPDYDFYYRPRRRSLGDISDEELLLPIDDYLAMKRTEEERLRLEEELELGFSASPPSRSPPHFELSSLRYSSPQAHVKVEETRKDFRYSTYHIPTKAEASTSYAELRERHAQAAYRQPKQRQRIMAEREDEELLRPVTTTQHLSEYKSELDFMSKEEKSRKKSRRQREVTEITEIEEEYEISKHAQRESSSSASRLLRRRRSLSPTYIELMRPVSELIRSRPQPAEEYEDDTERRSPTPERTRPRSPSPVSSERSLSRFERSARFDIFSRYESMKAALKTQKTSERKYEVLSQQPFTLDHAPRITLRMRSHRVPCGQNTRFILNVQSKPTAEVKWYHNGVELQESSKIHYTNTSGVLTLEILDCHTDDSGTYRAVCTNYKGEASDYATLDVTGGDYTTYASQRRDEEVPRSVFPELTRTEAYAVSSFKKTSEMEASSSVREVKSQMTETRESLSSYEHSASAEMKSAALEEKSLEEKSTTRKIKTTLAARILTKPRSMTVYEGESARFSCDTDGEPVPTVTWLRKGQVLSTSARHQVTTTKYKSTFEISSVQASDEGNYSVVVENSEGKQEAEFTLTIQKARVTEKAVTSPPRVKSPEPRVKSPEAVKSPKRVKSPEPSHPKAVSPTETKPTPTEKVQHLPVSAPPKITQFLKAEASKEIAKLTCVVESSVLRAKEVTWYKDGKKLKENGHFQFHYSADGTYELKINNLTESDQGEYVCEISGEGGTSKTNLQFMGQAFKSIHEKVSKISETKKSDQKTTESTVTRKTEPKAPEPISSKPVIVTGLQDTTVSSDSVAKFAVKATGEPRPTAIWTKDGKAITQGGKYKLSEDKGGFFLEIHKTDTSDSGLYTCTVKNSAGSVSSSCKLTIKAIKDTEAQKVSTQKTSEITPQKKAVVQEEISQKALRSEEIKMSEAKSQEKLALKEEASKVLISEEVKKSAATSLEKSIVHEEITKTSQASEEVRTHAEIKAFSTQMSINEGQRLVLKANIAGATDVKWVLNGVELTNSEEYRYGVSGSDQTLTIKQASHRDEGILTCISKTKEGIVKCQYDLTLSKELSDAPAFISQPRSQNINEGQNVLFTCEISGEPSPEIEWFKNNLPISISSNVSISRSRNVYSLEIRNASVSDSGKYTIKAKNFRGQCSATASLMVLPLVEEPSREVVLRTSGDTSLQGSFSSQSVQMSASKQEASFSSFSSSSASSMTEMKFASMSAQSMSSMQESFVEMSSSSFMGISNMTQLESSTSKMLKAGIRGIPPKIEALPSDISIDEGKVLTVACAFTGEPTPEVTWSCGGRKIHSQEQGRFHIENTDDLTTLIIMDVQKQDGGLYTLSLGNEFGSDSATVNIHIRSI

SEQ ID NO: 906 - protein, 1024 aa, Homo sapiens
MARHGPPWSRLDAQQERDVRELVRGVAGLQDEADPNFQLALNFAWSNFRFHRFLDVNSHKIEKTIEGIYEKFVIHSDLSKAASWKRLTEEFLNAPLPSIKEIKTDAHYSILSLLLCLSDSPSNSSYVETPRNKEVEKKDDFDWGKYLMEDEEMDIGPYMDTPNWSEESEEENDQQPLSREDSGIQVDRTPLEEQDQNRKLDPCISWKDEPDDRSWLEHHVVHQYWTARPSQFPHSLHLHSNLAAVWDQHLYSSDPLYVPDDRVLVTETQVIRETLWLLSGVKKLFIFQLIDGKVTVRNNIIVTHLTHSCLRSVLEQIAAYGQVVFRLQEFIDEVMGHSSESMLPGSGSVPKKSTEAPFRTYQAFMWALYKYFISFKEELAEIEKCIINNDTTITLAIVVDKLAPRLSQLKVLHKVFSTGVAEVPPDTRNVVRASHLLNTLYKAILEYDNVGEASEQTVSLLFSLWVETVRPYLQTVDEWIVHGHLWDGAREFIIQRNKNVPVNHRDFWYATYTLYSVSEKTENEEKMSDNASASSGSDQGPSSRQHTMVSFLKPVLKQIIMAGKSMQLLKNLQCAESTTCQAGARDAERKSLYTLFLESVQSRLRHGEDSTPQVLTEQQATKENLMKMQSIAESHLELDDVHDPLLAINFARMYLEQSDFHEKFAGGDVCVDRSSESVTCQTFELTLRSCLYPHIDKQYLDCCGNLMQTLKKDYRLVEYLQAMRNFFLMEGGDTMYDFYTSIFDKIREKETWQNVSFLNVQLQEAVGQRYPEDSSRLSISFENVDTAKKKLPVHILDGLTLSYKVPWPVDIVISLECQKIYNQVFLLLLQIKWAKYSLDVLLFGELVSTAEKPRLKEGLIHEQDTVAQFGPQKEPVRQQIHRMFLLRVKLMHFVNSLHNYIMTRILHSTGLEFQHQVEEAKDLDQLIKIHYRYLSTIHDRCLLREKVSFVKEAIMKVLNLALMFADGWQAGLGTWRMESIEKMESDFKNCHMFLVTILNKAVCRGSFPHCEYIMLKYFYLCISL

SEQ ID NO: 907-908 - skipped (2 entries)

SEQ ID NO: 909 - protein, 529 aa, Homo sapiens [sequence omitted]

SEQ ID NO: 910 - protein, 1052 aa, Homo sapiens
MEGSEPVAAHQGEEASCSSWGTGSTNKNLPIMSTASVEIDDALYSRQRYVLGDTAMQKMAKSHVFLSGMGGLGLEIAKNLVLAGIKAVTIHDTEKCQAWDLGTNFFLSEDDVVNKRNRAEAVLKHIAELNPYVHVTSSSVPFNETTDLSFLDKYQCVVLTEMKLPLQKKINDFCRSQCPPIKFISADVHGIWSRLFCDFGDEFEVLDTTGEEPKEIFISNITQANPGIVTCLENHPHKLETGQFLTFREINGMTGLNGSIQQITVISPFSFSIGDTTELEPYLHGGIAVQVKTPKTVFFESLERQLKHPKCLIVDFSNPEAPLEIHTAMLALDQFQEKYSRKPNVGCQQDSEELLKLATSISETLEEKPDVNADIVHWLSWTAQGFLSPLAAAVGGVASQEVLKAVTGKFSPLCQWLYLEAADIVESLGKPECEEFLPRGDRYDALRACIGDTLCQKLQNLNIFLVGCGAIGCEMLKNFALLGVGTSKEKGMITVTDPDLIEKSNLNRQFLFRPHHIQKPKSYTAADATLKINSQIKIDAHLNKVCPTTETIYNDEFYTKQDVIITALDNVEARRYVDSRCLANLRPLLDSGTMGTKGHTEVIVPHLTESYNSHRDPPEEEIPFCTLKSFPAAIEHTIQWARDKFESSFSHKPSLFNKFWQTYSSAEEVLQKIQSGHSLEGCFQVIKLLSRRPRNWSQCVELARLKFEKYFNHKALQLLHCFPLDIRLKDGSLFWQSPKRPPSPIKFDLNEPLHLSFLQNAAKLYATVYCIPFAEEDLSADALLNILSEVKIQEFKPSNKVVQTDETARKPDHVPISSEDERNAIFQLEKAILSNEATKSDLQMAVLSFEKDDDHNGHIDFITAASNLRAKMYSIEPADRFKTKRIAGKIIPAIATTTATVSGLVALEMIKVTGGYPFEAYKNCFLNLAIPIVVFTETTEVRKTKIRNGISFTIWDRWTVHGKEDFTLLDFINAVKEKYGIEPTMVVQGVKMLYVPVMPGHAKRLKLTMHKLVKPTTEKKYVDLTVSFAPDIDGDEDLPGPPVRYYFSHDTD

SEQ ID NO: 911 - protein, 183 aa, Homo sapiens
MSSPSPGKRRMDTDVVKLIESKHEVTILGGLNEFVVKFYGPQGTPYEGGVWKVRVDLPDKYPFKSPSIGFMNKIFHPNIDEASGTVCLDVINQTWTALYDLTNIFESFLPQLLAYPNPIDPLNGDAAAMYLHRPEEYKQKIKEYIQKYATEEALKEQEEGTGDSSSESSMSDFSEDEAQDMEL

SEQ ID NO: 912 - protein, 875 aa, Homo sapiens
MEKLHQCYWKSGEPQSDDIEASRMKRAAAKHLIERYYHQLTEGCGNEACTNEFCASCPTFLRMDNNAAAIKALELYKINAKLCDPHPSKKGASSAYLENSKGAPNNSCSEIKMNKKGARIDFKDVTYLTEEKVYEILELCREREDYSPLIRVIGRVFSSAEALVQSFRKVKQHTKEELKSLQAKDEDKDEDEKEKAACSAAAMEEDSEASSSRIGDSSQGDNNLQKLGPDDVSVDIDAIRRVYTRLLSNEKIETAFLNALVYLSPNVECDLTYHNVYSRDPNYLNLFIIVMENRNLHSPEYLEMALPLFCKAMSKLPLAAQGKLIRLWSKYNADQIRRMMETFQQLITYKVISNEFNSRNLVNDDDAIVAASKCLKMVYYANVVGGEVDTNHNEEDDEEPIPESSELTLQELLGEERRNKKGPRVDPLETELGVKTLDCRKPLIPFEEFINEPLNEVLEMDKDYTFFKVETENKFSFMTCPFILNAVTKNLGLYYDNRIRMYSERRITVLYSLVQGQQLNPYLRLKVRRDHIIDDALVRLEMIAMENPADLKKQLYVEFEGEQGVDEGGVSKEFFQLVVEEIFNPDIGMFTYDESTKLFWFNPSSFETEGQFTLIGIVLGLAIYNNCILDVHFPMVVYRKLMGKKGTFRDLGDSHPVLYQSLKDLLEYEGNVEDDMMITFQISQTDLFGNPMMYDLKENGDKIPITNENRKEFVNLYSDYILNKSVEKQFKAFRRGFHMVTNESPLKYLFRPEEIELLICGSRNLDFQALEETTEYDGGYTRDSVLIREFWEIVHSFTDEQKRLFLQFTTGTDRAPVGGLGKLKMIIAKNGPDTERLPTSHTCFNVLLLPEYSSKEKLKERLLKAITYAKGFGML

SEQ ID NO: 913 - protein, 1068 aa, Homo sapiens
MFTLSQTSRAWFIDRARQAREERLVQKERERAAVVIQAHVRSFLCRSRLQRDIRREIDDFFKADDPESTKRSALCIFKIARKLLFLFRIKEDNERFEKLCRSILSSMDAENEPKVWYVSLACSKDLTLLWIQQIKNILWYCCDFLKQLKPEILQDSRLITLYLTMLVTFTDTSTWKILRGKGESLRPAMNHICANIMGHLNQHGFYSVLQILLTRGLARPRPCLSKGTLTAAFSLALRPVIAAQFSDNLIRPFLIHIMSVPALVTHLSTVTPERLTVLESHDMLRKFIIFLRDQDRCRDVCESLEGCHTLCLMGNLLHLGSLSPRVLEEETDGFVSLLTQTLCYCRKYVSQKKSNLTHWHPVLGWFSQSVDYGLNESMHLITKQLQFLWGVPLIRIFFCDILSKKLLESQEPAHAQPASPQNVLPVKSLLKRAFQKSASVRNILRPVGGKRVDSAEVQKVCNICVLYQTSLTTLTQIRLQILTGLTYLDDLLPKLWAFICELGPHGGLKLFLECLNNDTEESKQLLAMLMLFCDCSRHLITILDDIEVYEEQISFKLEELVTISSFLNSFVFKMIWDGIVENAKGETLELFQSVHGWLMVLYERDCRRRFTPEDHWLRKDLKPSVLFQELDRDRKRAQLILQYIPHVIPHKNRVLLFRTMVTKEKEKLGLVETSSASPHVTHITIRRSRMLEDGYEQLRQLSQHAMKGVIRVKFVNDLGVDEAGIDQDGVFKEFLEEIIKRVFDPALNLFKTTSGDERLYPSPTSYIHENYLQLFEFVGKMLGKAVYEGIVVDVPFASFFLSQLLGHHHSVFYSSVDELPSLDSEFYKNLTSIKRYDGDITDLGLTLSYDEDVMGQLVCHELIPGGKTIPVTNENKISYIHLMAHFRMHTQIKNQTAALISGFRSIIKPEWIRMFSTPELQRLISGDNAEIDLEDLKKHTVYYGGFHGSHRVIIWLWDILASDFTPDERAMFLKFVTSCSRPPLLGFAYLKPPFSIRCVEVSDDQDTGDTLGSVLRGFFTIRKREPGGRLPTSSTCFNLLKLPNYSKKSVLREKLRYAISMNTGFELS

SEQ ID NO: 914 - protein, 1083 aa, Homo sapiens
MFSFEGDFKTRPKVSLGGASRKEEKASLLHRTQEERRKREEERRRLKNAIIIQSFIRGYRDRKQQYSIQRSAFDRCATLSQSGGAFPIANGPNLTLLVRQLLFFYKQNEDSKRLIWLYQNLIKHSSLFVKQLDGSERLTCLFQIKRLMSLCCRLLQNCNDDSLNVALPMRMLEVFSSENTYLPVLQDASYVVSVIEQILHYMIHNGYYRSLYLLINSKLPSSIEYSDLSRVPIAKILLENVLKPLHFTYNSCPEGARQQVFTAFTEEFLAAPFTDQIFHFIIPALADAQTVFPYEPFLNALLLIESRCSRKSGGAPWLFYFVLTVGENYLGALSEEGLLVYLRVLQTFLSQLPVSPASASCHDSASDSEEESEEADKPSSPEDGRLSVSYITEECLKKLDTKQQTNTLLNLVWRDSASEEVFTTMASVCHTLMVQHRMMVPKVRLLYSLAFNARFLRHLWFLISSMSTRMITGSMVPLLQVISRGSPMSFEDSSRIIPLFYLFSSLFSHSLISIHDNEFFGDPIEVVGQRQSSMMPFTLEELIMLSRCLRDACLGIIKLAYPETKPEVREEYITAFQSIGVTTSSEMQQCIQMEQKRWIQLFKVITNLVKMLKSRDTRRNFCPPNHWLSEQEDIKADKVTQLYVPASRHVWRFRRMGRIGPLQSTLDVGLESPPLSVSEERQLAVLTELPFVVPFEERVKIFQRLIYADKQEVQGDGPFLDGINVTIRRNYIYEDAYDKLSPENEPDLKKRIRVHLLNAHGLDEAGIDGGGIFREFLNELLKSGFNPNQGFFKTTNEGLLYPNPAAQMLVGDSFARHYYFLGRMLGKALYENMLVELPFAGFFLSKLLGTSADVDIHHLASLDPEVYKNLLFLKSYEDDVEELGLNFTVVNNDLGEAQVVELKFGGKDIPVTSANRIAYIHLVADYRLNRQIRQHCLAFRQGLANVVSLEWLRMFDQQEIQVLISGAQVPISLEDLKSFTNYSGGYSADHPVIKVFWRVVEGFTDEEKRKLLKFVTSCSRPPLLGFKELYPAFCIHNGGSDLERLPTASTCMNLLKLPEFYDETLLRSKLLYAIECAAGFELS

SEQ ID NO: 915 - protein, 380 aa, Homo sapiens
MSLSDWHLAVKLADQPLTPKSILRLPETELGEYSLGGYSISFLKQLIAGKLQESVPDPELIDLIYCGRKLKDDQTLDFYGIQPGSTVHVLRKSWPEPDQKPEPVDKVAAMREFRVLHTALHSSSSYREAVFKMLSNKESLDQIIVATPGLSSDPIALGVLQDKDLFSVFADPNMLDTLVPAHPALVNAIVLVLHSVAGSAPMPGTDSSSRSMPSSSYRDMPGGFLFEGLSDDEDDFHPNTRSTPSSSTPSSRPASLGYSGAAGPRPITQSELATALALASTPESSSHTPTPGTQGHSSGTSPMSSGVQSGTPITNDLFSQALQHALQASGQPSLQSQWQPQLQQLRDMGIQDDELSLRALQATGGDIQAALELIFAGGAP

SEQ ID NO: 916 - protein, 2799 aa, Homo sapiens
MTSIHFVVHPLPGTEDQLNDRLREVSEKLNKYNLNSHPPLNVLEQATIKQCVVGPNHAAFLLEDGRVCRIGFSVQPDRLELGKPDNNDGSKLNSNSGAGRTSRPGRTSDSPWFLSGSETLGRLAGNTLGSRWSSGVGGSGGGSSGRSSAGARDSRRQTRVIRTGRDRGSGLLGSQPQPVIPASVIPEELISQAQVVLQGKSRSVIIRELQRTNLDVNLAVNNLLSRDDEDGDDGDDTASESYLPGEDLMSLLDADIHSAHPSVIIDADAMFSEDISYFGYPSFRRSSLSRLGSSRVLLLPLERDSELLRERESVLRLRERRWLDGASFDNERGSTSKEGEPNLDKKNTPVQSPVSLGEDLQWWPDKDGTKFICIGALYSELLAVSSKGELYQWKWSESEPYRNAQNPSLHHPRATFLGLTNEKIVLLSANSIRATVATENNKVATWVDETLSSVASKLEHTAQTYSELQGERIVSLHCCALYTCAQLENSLYWWGVVPFSQRKKMLEKARAKNKKPKSSAGISSMPNITVGTQVCLRNNPLYHAGAVAFSISAGIPKVGVLMESVWNMNDSCRFQLRSPESLKNMEKASKTTEAKPESKQEPVKTEMGPPPSPASTCSDASSIASSASMPYKRRRSTPAPKEEEKVNEEQWSLREVVFVEDVKNVPVGKVLKVDGAYVAVKFPGTSSNTNCQNSSGPDADPSSLLQDCRLLRIDELQVVKTGGTPKVPDCFQRTPKKLCIPEKTEILAVNVDSKGVHAVLKTGNWVRYCIFDLATGKAEQENNFPTSSIAFLGQNERNVAIFTAGQESPIILRDGNGTIYPMAKDCMGGIRDPDWLDLPPISSLGMGVHSLINLPANSTIKKKAAVIIMAVEKQTLMQHILRCDYEACRQYLMNLEQAVVLEQNLQMLQTFISHRCDGNRNILHACVSVCFPTSNKETKEEEEAERSERNTFAERLSAVEAIANAISVVSSNGPGNRAGSSSSRSLRLREMMRRSLRAAGLGRHEAGASSSDHQDPVSPPIAPPSWVPDPPAMDPDGDIDFILAPAVGSLTTAATGTGQGPSTSTIPGPSTEPSVVESKDRKANAHFILKLLCDSVVLQPYLRELLSAKDARGMTPFMSAVSGRAYPAAITILETAQKIAKAEISSSEKEEDVFMGMVCPSGTNPDDSPLYVLCCNDTCSFTWTGAEHINQDIFECRTCGLLESLCCCTECARVCHKGHDCKLKRTSPTAYCDCWEKCKCKTLIAGQKSARLDLLYRLLTATNLVTLPNSRGEHLLLFLVQTVARQTVEHCQYRPPRIREDRNRKTASPEDSDMPDHDLEPPRFAQLALERVLQDWNALKSMIMFGSQENKDPLSASSRIGHLLPEEQVYLNQQSGTIRLDCFTHCLIVKCTADILLLDTLLGTLVKELQNKYTPGRREEAIAVTMRFLRSVARVFVILSVEMASSKKKNNFIPQPIGKCKRVFQALLPYAVEELCNVAESLIVPVRMGIARPTAPFTLASTSIDAMQGSEELFSVEPLPPRPSSDQSSSSSQSQSSYIIRNPQQRRISQSQPVRGRDEEQDDIVSADVEEVEVVEGVAGEEDHHDEQEEHGEENAEAEGQHDEHDEDGSDMELDLLAAAETESDSESNHSNQDNASGRRSVVTAATAGSEAGASSVPAFFSEDDSQSNDSSDSDSSSSQSDDIEQETFMLDEPLERTTNSSHANGAAQAPRSMQWAVRNTQHQRAASTAPSSTSTPAASSAGLIYIDPSNLRRSGTISTSAAAAAAALEASNASSYLTSASSLARAYSIVIRQISDLMGLIPKYNHLVYSQIPAAVKLTYQDAVNLQNYVEEKLIPTWNWMVSIMDSTEAQLRYGSALASAGDPGHPNHPLHASQNSARRERMTAREEASLRTLEGRRRATLLSARQGMMSARGDFLNYALSLMRSHNDEHSDVLPVLDVCSLKHVAYVFQALIYWIKAMNQQTTLDTPQLERKRTRELLELGIDNEDSEHENDDDTNQSATLNDKDDDSLPAETGQNHPFFRRSDSMTFLGCIPPNPFEVPLAEAIPLADQPHLLQPNARKEDLFGRPSQGLYSSSASSGKCLMEVTVDRNCLEVLPTKMSYAANLKNVMNMQNRQKKEGEEQPVLPEETESSKPGPSAHDLAAQLKSSLLAEIGLTESEGPPLTSFRPQCSFMGMVISHDMLLGRWRLSLELFGRVFMEDVGAEPGSILTELGGFEVKESKFRREMEKLRNQQSRDLSLEVDRDRDLLIQQTMRQLNNHFGRRCATTPMAVHRVKVTFKDEPGEGSGVARSFYTAIAQAFLSNEKLPNLECIQNANKGTHTSLMQRLRNRGERDREREREREMRRSSGLRAGSRRDRDRDFRRQLSIDTRPFRPASEGNPSDDPEPLPAHRQALGERLYPRVQAMQPAFASKITGMLLELSPAQLLLLLASEDSLRARVDEAMELIIAHGRENGADSILDLGLVDSSEKVQQENRKRHGSSRSVVDMDLDDTDDGDDNAPLFYQPGKRGFYTPRPGKNTEARLNCFRNIGRILGLCLLQNELCPITLNRHVIKVLLGRKVNWHDFAFFDPVMYESLRQLILASQSSDADAVFSAMDLAFAIDLCKEEGGGQVELIPNGVNIPVTPQNVYEYVRKYAEHRMLVVAEQPLHAMRKGLLDVLPKNSLEDLTAEDFRLLVNGCGEVNVQMLISFTSFNDESGENAEKLLQFKRWFWSIVEKMSMTERQDLVYFWTSSPSLPASEEGFQPMPSITIRPPDDQHLPTANTCISRLYVPLYSSKQILKQKLLLAIKTKNFGFV

SEQ ID NO: 917 - protein, 425 aa, Homo sapiens
MAGAEGAAGRQSELEPVVSLVDVLEEDEELENEACAVLGGSDSEKCSYSQGSVKRQALYACSTCTPEGEEPAGICLACSYECHGSHKLFELYTKRNFRCDCGNSKFKNLECKLLPDKAKVNSGNKYNDNFFGLYCICKRPYPDPEDEIPDEMIQCVVCEDWFHGRHLGAIPPESGDFQEMVCQACMKRCSFLWAYAAQLAVTKISTEDDGLVRNIDGIGDQEVIKPENGEHQDSTLKEDVPEQGKDDVREVKVEQNSEPCAGSSSESDLQTVFKNESLNAESKSGCKLQELKAKQLIKKDTATYWPLNWRSKLCTCQDCMKMYGDLDVLFLTDEYDTVLAYENKGKIAQATDRSDPLMDTLSSMNRVQQVELICEYNDLKTELKDYLKRFADEGTVVKREDIQQFFEEFQSKKRRRVDGMQYYCS

SEQ ID NO: 918 - skipped

SEQ ID NO: 919 - protein, 161 aa, Homo sapiens
MLMPVHFLLLLLLLLGGPRTGLPHKFYKAKPIFSCLNTALSEAEKGQWEDASLLSKRSFHYLRSRDASSGEEEEGKEKKTFPISGARGGARGTRYRYVSQAQPRGKPRQDTAKSPHRTKFTLSLDVPTNIMNLLFNIAKAKNLRAQAAANAHLMAQIGRKK

SEQ ID NO: 920 - protein, 1703 aa, Homo sapiens
MSLLCVGVKKAKFDGAQEKFNTYVTLKVQNVKSTTIAVRGSQPSWEQDFMFEINRLDLGLTVEVWNKGLIWDTMVGTVWIPLRTIRQSNEEGPGEWLTLDSQVIMADSEICGTKDPTFHRILLDTRFELPLDIPEEEARYWAKKLEQLNAMRDQDEYSFQDEQDKPLPVPSNQCCNWNYFGWGEQHNDDPDSAVDDRDSDYRSETSNSIPPPYYTTSQPNASVHQYSVRPPPLGSRESYSDSMHSYEEFSEPQALSPTGSSRYASSGELSQGSSQLSEDFDPDEHSLQGSDMEDERDRDSYHSCHSSVSYHKDSPRWDQDEEELEEDLEDFLEEEELPEDEEELEEEEEEVPDDLGSYAQREDVAVAEPKDFKRISLPPAAPGKEDKAPVAPTEAPDMAKVAPKPATPDKVPAAEQIPEAEPPKDEESFRPREDEEGQEGQDSMSRAKANWLRAFNKVRMQLQEARGEGEMSKSLWFKGGPGGGLIIIDSMPDIRKRKPIPLVSDLAMSLVQSRKAGITSALASSTLNNEELKNHVYKKTLQALIYPISCTTPHNFEVWTATTPTYCYECEGLLWGIARQGMRCTECGVKCHEKCQDLLNADCLQRAAEKSSKHGAEDRTQNIIMVLKDRMKIRERNKPEIFELIQEIFAVTKTAHTQQMKAVKQSVLDGTSKWSAKISITVVCAQGLQAKDKTGSSDPYVTVQVGKTKKRTKTIYGNLNPVWEENFHFECHNSSDRIKVRVWDEDDDIKSRVKQRFKRESDDFLGQTIIEVRTLSGEMDVWYNLDKRTDKSAVSGAIRLHISVEIKGEEKVAPYHVQYTCLHENLFHFVTDVQNNGVVKIPDAKGDDAWKVYYDETAQEIVDEFAMRYGVESIYQAMTHFACLSSKYMCPGVPAVMSTLLANINAYYAHTTASTNVSASDRFAASNFGKERFVKLLDQLHNSLRIDLSMYRNNFPASSPERLQDLKSTVDLLTSITFFRMKVQELQSPPRASQVVKDCVKACLNSTYEYIFNNCHELYSREYQTDPAKKGEVLPEEQGPSIKNLDFWSKLITLIVSIIEEDKNSYTPCLNQFPQELNVGKISAEVMWNLFAQDMKYAMEEHDKHRLCKSADYMNLHFKVKWLYNEYVTELPAFKDRVPEYPAWFEPFVIQWLDENEEVSRDFLHGALERDKKDGFQQTSEHALFSCSVVDVFSQLNQSFEIIKKLECPDPQIVGHYMRRFAKTISNVLLQYADIISKDFASYCSKEKEKVPCILMNNTQQLRVQLEKMFEAMGGKELDAEASDILKELQVKLNNVLDELSRVFATSFQPHIEECVKQMGDILSQVKGTGNVPASACSSVAQDADNVLQPIMDLLDSNLTLFAKICEKTVLKRVLKELWKLVMNTMEKTIVLPPLTDQTMIGNLLRKHGKGLEKGRVKLPSHSDGTQMIFNAAKELGQLSKLKDHMVREEAKSLTPKQCAVVELALDTIKQYFHAGGVGLKKTFLEKSPDLQSLRYALSLYTQATDLLIKTFVQTQSAQGLGVEDPVGEVSVHVELFTHPGTGEHKVTVKVVAANDLKWQTSGIFRPFIEVNIIGPQLSDKKRKFATKSKNNSWAPKYNESFQFTLSADAGPECYELQVCVKDYCFAREDRTVGLAVLQLRELAQRGSAACWLPLGRRIHMDDTGLTVLRILSQRSNDEVAKEFVKLKSDTRSAEEGGAAPAP

SEQ ID NO: 921 - protein, 3258 aa, Homo sapiens
MVKRKSSEGQEQDGGRGIPLPIQTFLWRQTSAFLRPKLGKQYEASCVSFERVLVENKLHGLSPALSEAIQSISRWELVQAALPHVLHCTATLLSNRNKLGHQDKLGVAETKLLHTLHWMLLEAPQDCNNERFGGTDRGSSWGGSSSAFIHQVENQGSPGQPCQSSSNDEEENNRRKIFQNSMATVELFVFLFAPLVHRIKESDLTFRLASGLVIWQPMWEHRQPGVSGFTALVKPIRNIITAKRSSPINSQSRTCESPNQDARHLEGLQVVCETFQSDSISPKATISGCHRGNSFDGSLSSQTSQERGPSHSRASLVIPPCQRSRYATYFDVAVLRCLLQPHWSEEGTQWSLMYYLQRLRHMLEEKPEKPPEPDIPLLPRPRSSSMVAAAPSLVNTHKTQDLTMKCNEEEKSLSSEAFSKVSLTNLRRSAVPDLSSDLGMNIFKKFKSRKEDRERKGSIPFHHTGKRRPRRMGVPFLLHEDHLDVSPTRSTFSFGSFSGLGEDRRGIEKGGWQTTILGKLTRRGSSDAATEMESLSARHSHSHHTLVSDLPDPSNSHGENTVKEVRSQISTITVATFNTTLASFNVGYADFFNEHMRKLCNQVPIPEMPHEPLACANLPRSLTDSCINYSYLEDTEHIDGTNNFVHKNGMLDLSVVLKAVYLVLNHDISSRICDVALNIVECLLQLGVVPCVEKNRKKSENKENETLEKRPSEGAFQFKGVSGSSTCGFGGPAVSGAGDGGGEEGGGGDGGGGGGDGGGGGGGGGGPYEKNDKNQEKDESTPVSNHRLALTMLIKIVKSLGCAYGCGEGHRGLSGDRLRHQVFRENAQNCLTKLYKLDKMQFRQTMRDYVNKDSLNNVVDFLHALLGFCMEPVTDNKAGFGNNFTTVDNKSTAQNVEGIIVSAMFKSLITRCASTTHELHSPENLGLYCDIRQLVQFIKEAHGNVFRRVALSALLDSAEKLAPGKKVEENEQESKPAGSKRSEAGSIVDKGQVSSAPEECRSFMSGRPSQTPEHDEQMQGANLGRKDFWRKMFKSQSAASDTSSQSEQDTSECTTAHSGTTSDRRARSRSRRISLRKKLKLPIGKRNWLKRSSLSGLADGVEDLLDISSVDRLSFIRQSSKVKFTSAVKLSEGGPGSGMENGRDEEENFFKRLGCHSFDDHLSPNQDGGKSKNVVNLGAIRQGMKRFQFLLNCCEPGTIPDASILAAALDLEAPVVARAALFLECARFVHRCNRGNWPEWMKGHHVNITKKGLSRGRSPIVGNKRNQKLQWNAAKLFYQWGDAIGVRLNELCHGESESPANLLGLIYDEETKRRLRKEDEEEDFLDDSTVNPSKCGCPFALKMAACQLLLEITTFLRETFSCLPRPRTEPLVDLESCRLRLDPELDRHRYERKISFAGVLDENEDSKDSLHSSSHTLKSDAGVEEKKEGSPWSASEPSIEPEGMSNAGAEENYHRNMSWLHVMILLCNQQSFICTHVDYCHPHCYLHHSRSCARLVRAIKLLYGDSVDSLRESSNISSVALRGKKQKECSDKSCLRTPSLKKRVSDANLEGKKDSGMLKYIRLQVMSLSPAPLSLLIKAAPILTEEMYGDIQPAAWELLLSMDEHMAGAAAAMFLLCAVKVPEAVSDMLMSEFHHPETVQRLNAVLKFHTLWRFRYQVWPRMEEGAQQIFKIPPPSINFTLPSPVLGMPSVPMFDPPWVPQCSGSVQDPINEDQSKSFSARAVSRSHQRAEHILKNLQQEEEKKRLGREASLITAIPITQEACYEPTCTPNSEPEEEVEEVTNLASRRLSVSPSCTSSTSHRNYSFRRGSVWSVRSAVSAEDEEHTTEHTPNHHVPQPPQAVFPACICAAVLPIVHLMEDGEVREDGVAVSAVAQQVLWNCLIEDPSTVLRHFLEKLTISNRQDELMYMLRKLLLNIGDFPAQTSHILFNYLVGLIMYFVRTPCEWGMDAISATLTFLWEVVGYVEGLFFKDLKQTMKKEQCEVKLLVTASMPGTKTLVVHGQNECDIPTQLPVHEDTQFEALLKECLEFFNIPESQSTHYFLMDKRWNLIHYNKTYVRDIYPFRRSVSPQLNLVHMHPEKGQELIQKQVFTRKLEEVGRVLFLISLTQKIPTAHKQSHVSMLQEDLLRLPSFPRSAIDAEFSLFSDPQAGKELFGLDTLQKSLWIQLLEEMFLGMPSEFPWGDEIMLFLNVFNGALILHPEDSALLRQYAATVINTAVHFNHLFSLSGYQWILPTMLQVYSDYESNPQLRQAIEFACHQFYILHRKPFVLQLFASVAPLLEFPDAANNGPSKGVSAQCLFDLLQSLEGETTDILDILELVKAEKPLKSLDFCYGNEDLTFSISEAIKLCVTVVAYAPESFRSLQMLMVLEALVPCYLQKLKRQTSQVETVPAAREEIAATAALATSLQALLYSVEVLTRPMTAPQMSRCDQGHKGTTTANHTMSSGVNTRYQEQGAKLHFIRENLHLLEEGQGIPREELDERIAREEFRRPRESLLNICTEFYKHCGPRLKILQNLAGEPRVIALELLDVKSHMRLAEIAHSLLKLAPYDTQTMESRGLRRYIMEMLPITDWTAEAVRPALILILKRLDRMFNKIHKMPTLRRQVEWEPASNLIEGVCLTLQRQPIISFLPHLRSLINVCVNLVMGVVGPSSVADGLPLLHLSPYLSPPLPFSTAVVRLVALQIQALKEDFPLSHVISPFTNQERREGMLLNLLIPFVLTVGSGSKDSPWLEQPEVQLLLQTVINVLLPPRIISTSRSKNFMLESSPAHCSTPGDAGKDLRREGLAESTSQAAYLALKVILVCFERQLGSQWYWLSLQVKEMALRKVGGLALWDFLDFIVRTRIPIFVLLRPFIQCKLLAQPAENHEELSARQHIADQLERRFIPRPLCKSSLIAEFNSELKILKEAVHSGSAYQGKTSISTVGTSTSAYRLSLATMSRSNTGTGTVWEQDSEPSQQASQDTLSRTDEEDEENDSISMPSVVSEQEAYLLSAIGRRRFSSHVSSMSVPQAEVGMLPSQSEPNVLDDSQGLAAEGSLSRVASIQSEPGQQNLLVQQPLGRKRGLRQLRRPLLSRQKTQTEPRNRQGARLSTTRRSIQPKTKPSADQKRSVTFIEAQPEPAAAPTDALPATGQLQGCSPAPSRKPEAMDEPVLTSSPAIVVADLHSVSPKQSENFPTEEGEKEEDTEAQGATAHSPLSAQLSDPDDFTGLETSSLLQHGDTVLHISEENGMENPLLSSQFTFTPTELGKTDAVLDESHV

SEQ ID NO: 922 - protein, 384 aa, Homo sapiens
MAGAEWKSLEECLEKHLPLPDLQEVKRVLYGKELRKLDLPREAFEAASREDFELQGYAFEAAEEQLRRPRIVHVGLVQNRIPLPANAPVAEQVSALHRRIKAIVEVAAMCGVNIICFQEAWTMPFAFCTREKLPWTEFAESAEDGPTTRFCQKLAKNHDMVVVSPILERDSEHGDVLWNTAVVISNSGAVLGKTRKNHIPRVGDFNESTYYMEGNLGHPVFQTQFGRIAVNICYGRHHPLNWLMYSINGAEIIFNPSATIGALSESLWPIEARNAAIANHCFTCAINRVGTEHFPNEFTSGDGKKAHQDFGYFYGSSYVAAPDSSRTPGLSRSRDGLLVAKLDLNLCQQVNDVWNFKMTGRYEMYARELAEAVKSNYSPTIVKE

SEQ ID NO: 923 - protein, 1272 aa, Homo sapiens
MPAERKKPASMEEKDSLPNNKEKDCSERRTVSSKERPKDDIKLTAKKEVSKAPEDKKKRLEDDKRKKEDKERKKKDEEKVKAEEESKKKEEEEKKKHQEEERKKQEEQAKRQQEEEAAAQMKEKEESIQLHQEAWERHHLRKELRSKNQNAPDSRPEENFFSRLDSSLKKNTAFVKKLKTITEQQRDSLSHDFNGLNLSKYIAEAVASIVEAKLKISDVNCAVHLCSLFHQRYADFAPSLLQVWKKHFEARKEEKTPNITKLRTDLRFIAELTIVGIFTDKEGLSLIYEQLKNIINADRESHTHVSVVISFCRHCGDDIAGLVPRKVKSAAEKFNLSFPPSEIISPEKQQPFQNLLKEYFTSLTKHLKRDHRELQNTERQNRRILHSKGELSEDRHKQYEEFAMSYQKLLANSQSLADLLDENMPDLPQDKPTPEEHGPGIDIFTPGKPGEYDLEGGIWEDEDARNFYENLIDLKAFVPAILFKDNEKSCQNKESNKDDTKEAKESKENKEVSSPDDLELELENLEINDDTLELEGGDEAEDLTKKLLDEQEQEDEEASTGSHLKLIVDAFLQQLPNCVNRDLIDKAAMDFCMNMNTKANRKKLVRALFIVPRQRLDLLPFYARLVATLHPCMSDVAEDLCSMLRGDFRFHVRKKDQINIETKNKTVRFIGELTKFKMFTKNDTLHCLKMLLSDFSHHHIEMACTLLETCGRFLFRSPESHLRTSVLLEQMMRKKQAMHLDARYVTMVENAYYYCNPPPAEKTVKKKRPPLQEYVRKLLYKDLSKVTTEKVLRQMRKLPWQDQEVKDYVICCMINIWNVKYNSIHCVANLLAGLVLYQEDVGIHVVDGVLEDIRLGMEVNQPKFNQRRISSAKFLGELYNYRMVESAVIFRTLYSFTSFGVNPDGSPSSLDPPEHLFRIRLVCTILDTCGQYFDRGSSKRKLDCFLVYFQRYVWWKKSLEVWTKDHPFPIDIDYMISDTLELLRPKIKLCNSLEESIRQVQDLEREFLIKLGLVNDKDSKDSMTEGENLEEDEEEEEGGAETEEQSGNESEVNEPEEEEGSDNDDDEGEEEEEENTDYLTDSNKENETDEENTEVMIKGGGLKHVPCVEDEDFIQALDKMMLENLQQRSGESVKVHQLDVAIPLHLKSQLRKGPPLGGGEGEAESADTMPFVMLTRKGNKQQFKILNVPMSSQLAANHWNQQQAEQEERMRMKKLTLDINERQEQEDYQEMLQSLAQRPAPANTNRERRPRYQHPKGAPNADLIFKTGGRRR

SEQ ID NO: 924 - protein, 483 aa, Homo sapiens
MKEEKEHRPKEKRVTLLTPAGATGSGGGTSGDSSKGEDKQDRNKEKKEALSKVVIRRLPPTLTKEQLQEHLQPMPEHDYFEFFSNDTSLYPHMYARAYINFKNQEDIILFRDRFDGYVFLDNKGQEYPAIVEFAPFQKAAKKKTKKRDTKVGTIDDDPEYRKFLESYATDNEKMTSTPETLLEEIEAKNRELIAKKTTPLLSFLKNKQRMREEKREERRRREIERKRQREEERRKWKEEEKRKRKDIEKLKKIDRIPERDKLKDEPKIKVHRFLLQAVNQKNLLKKPEKGDEKELDKREKAKKLDKENLSDERASGQSCTLPKRSDSELKDEKPKRPEDESGRDYREREREYERDQERILRERERLKRQEEERRRQKERYEKEKTFKRKEEEMKKEKDTLRDKGKKAESTESIGSSEKTEKKEEVVKRDRIRNKDRPAMQLYQPGARSRNRLCPPDDSTKSGDSAAERKQESGISHRKEGGEE

SEQ ID NO: 925 - protein, 814 aa, Homo sapiens
MRVKDPTKALPEKAKRSKRPTVPHDEDSSDDIAVGLTCQHVSHAISVNHVKRAIAENLWSVCSECLKERRFYDGQLVLTSDIWLCLKCGFQGCGKNSESQHSLKHFKSSRTEPHCIIINLSTWIIWCYECDEKLSTHCNKKVLAQIVDFLQKHASKTQTSAFSRIMKLCEEKCETDEIQKGGKCRNLSVRGITNLGNTCFFNAVMQNLAQTYTLTDLMNEIKESSTKLKIFPSSDSQLDPLVVELSRPGPLTSALFLFLHSMKETEKGPLSPKVLFNQLCQKAPRFKDFQQQDSQELLHYLLDAVRTEETKRIQASILKAFNNPTTKTADDETRKKVKAYGKEGVKMNFIDRIFIGELTSTVMCEECANISTVKDPFIDISLPIIEERVSKPLLWGRMNKYRSLRETDHDRYSGNVTIENIHQPRAAKKHSSSKDKSQLIHDRKCIRKLSSGETVTYQKNENLEMNGDSLMFASLMNSESRLNESPTDDSEKEASHSESNVDADSEPSESESASKQTGLFRSSSGSGVQPDGPLYPLSAGKLLYTKETDSGDKEMAEAISELRLSSTVTGDQDFDRENQPLNISNNLCFLEGKHLRSYSPQNAFQTLSQSYITTSKECSIQSCLYQFTSMELLMGNNKLLCENCTKNKQKYQEETSFAEKKVEGVYTNARKQLLISAVPAVLILHLKRFHQAGLSLRKVNRHVDFPLMLDLAPFCSATCKNASVGDKVLYGLYGIVEHSGSMREGHYTAYVKVRTPSRKLSEHNTKKKNVPGLKAADNESAGQWVHVSDTYLQVVPESRALSAQAYLLFYERVL

SEQ ID NO: 926 - protein, 1102 aa, Homo sapiens
MNHQQQQQQQKAGEQQLSEPEDMEMEAGDTDDPPRITQNPVINGNVALSDGHNTAEEDMEDDTSWRSEATFQFTVERFSRLSESVLSPPCFVRNLPWKIMVMPRFYPDRPHQKSVGFFLQCNAESDSTSWSCHAQAVLKIINYRDDEKSFSRRISHLFFHKENDWGFSNFMAWSEVTDPEKGFIDDDKVTFEVFVQADAPHGVAWDSKKHTGYVGLKNQGATCYMNSLLQTLFFTNQLRKAVYMMPTEGDDSSKSVPLALQRVFYELQHSDKPVGTKKLTKSFGWETLDSFMQHDVQELCRVLLDNVENKMKGTCVEGTIPKLFRGKMVSYIQCKEVDYRSDRREDYYDIQLSIKGKKNIFESFVDYVAVEQLDGDNKYDAGEHGLQEAEKGVKFLTLPPVLHLQLMRFMYDPQTDQNIKINDRFEFPEQLPLDEFLQKTDPKDPANYILHAVLVHSGDNHGGHYVVYLNPKGDGKWCKFDDDVVSRCTKEEAIEHNYGGHDDDLSVRHCTNAYMLVYIRESKLSEVLQAVTDHDIPQQLVERLQEEKRIEAQKRKERQEAHLYMQVQIVAEDQFCGHQGNDMYDEEKVKYTVFKVLKNSSLAEFVQSLSQTMGFPQDQIRLWPMQARSNGTKRPAMLDNEADGNKTMIELSDNENPWTIFLETVDPELAASGATLPKFDKDHDVMLFLKMYDPKTRSLNYCGHIYTPISCKIRDLLPVMCDRAGFIQDTSLILYEEVKPNLTERIQDYDVSLDKALDELMDGDIIVFQKDDPENDNSELPTAKEYFRDLYHRVDVIFCDKTIPNDPGFVVTLSNRMNYFQVAKTVAQRLNTDPMLLQFFKSQGYRDGPGNPLRHNYEGTLRDLLQFFKPRQPKKLYYQQLKMKITDFENRRSFKCIWLNSQFREEEITLYPDKHGCVRDLLEECKKAVELGEKASGKLRLLEIVSYKIIGVHQEDELLECLSPATSRTFRIEEIPLDQVDIDKENEMLVTVAHFHKEVFGTFGIPFLLRIHQGEHFREVMKRIQSLLDIQEKEFEKFKFAIVMMGRHQYINEDEYEVNLKDFEPQPGNMSHPRPWLGLDHFNKAPKRSRYTYLEKAIKIHN

SEQ ID NO: 927 - protein, 2555 aa, Homo sapiens
MTAITHGSPVGGNDSQGQVLDGQSQHLFQQNQTSSPDSSNENSVATPPPEEQGQGDAPPQHEDEEPAFPHTELANLDDMINRPRWVVPVLPKGELEVLLEAAIDLSVKGLDVKSEACQRFFRDGLTISFTKILMDEAVSGWKFEIHRCIINNTHRLVELCVAKLSQDWFPLLELLAMALNPHCKFHIYNGTRPCELISSNAQLPEDELFARSSDPRSPKGWLVDLINKFGTLNGFQILHDRFFNGSALNIQIIAALIKPFGQCYEFLSQHTLKKYFIPVIEIVPHLLENLTDEELKKEAKNEAKNDALSMIIKSLKNLASRISGQDETIKNLEIFRLKMILRLLQISSFNGKMNALNEINKVISSVSYYTHRHSNPEEEEWLTAERMAEWIQQNNILSIVLQDSLHQPQYVEKLEKILRFVIKEKALTLQDLDNIWAAQAGKHEAIVKNVHDLLAKLAWDFSPGQLDHLFDCFKASWTNASKKQREKLLELIRRLAEDDKDGVMAHKVLNLLWNLAQSDDVPVDIMDLALSAHIKILDYSCSQDRDAQKIQWIDHFIEELRTNDKWVIPALKQIREICSLFGEASQNLSQTQRSPHIFYRHDLINQLQQNHALVTLVAENLATYMNSIRLYAGDHEDYDPQTVRLGSRYSHVQEVQERLNFLRFLLKDGQLWLCAPQAKQIWKCLAENAVYLCDREACFKWYSKLMGDEPDLDPDINKDFFESNVLQLDPSLLTENGMKCFERFFKAVNCRERKLIAKRRSYMMDDLELIGLDYLWRVVIQSSDEIANRAIDLLKEIYTNLGPRLKANQVVIHEDFIQSCFDRLKASYDTLCVFDGDKNSINCARQEAIRMVRVLTVIKEYINECDSDYHKERMILPMSRAFRGKHLSLIVRFPNQGRQVDELDIWSHTNDTIGSVRRCIVNRIKANVAHKKIELFVGGELIDSEDDRKLIGQLNLKDKSLITAKLTQINFNMPSSPDSSSDSSTASPGNHRNHYNDGPNLEVESCLPGVIMSVHPRYISFLWQVADLGSNLNMPPLRDGARVLMKLMPPDRTAVEKLRAVCLDHAKLGEGKLSPPLDSLFFGPSASQVLYLTEVVYALLMPAGVPLTDGSSDFQVHFLKSGGLPLVLSMLIRNNFLPNTDMETRRGAYLNALKIAKLLLTAIGYGHVRAVAEACQPVVDGTDPITQINQVTHDQAVVLQSALQSIPNPSSECVLRNESILLAQEISNEASRYMPDICVIRAIQKIIWASACGALGLVFSPNEEITKIYQMTTNGSNKLEVEDEQVCCEALEVMTLCFALLPTALDALSKEKAWQTFIIDLLLHCPSKTVRQLAQEQFFLMCTRCCMGHRPLLFFITLLFTILGSTAREKGKYSGDYFTLLRHLLNYAYNGNINIPNAEVLLVSEIDWLKRIRDNVKNTGETGVEEPILEGHLGVTKELLAFQTSEKKYHFGCEKGGANLIKELIDDFIFPASKVYLQYLRSGELPAEQAIPVCSSPVTINAGFELLVALAIGCVRNLKQIVDCLTEMYYMGTAITTCEALTEWEYLPPVGPRPPKGFVGLKNAGATCYMNSVIQQLYMIPSIRNSILAIEGTGSDLHDDMFGDEKQDSESNVDPRDDVFGYPHQFEDKPALSKTEDRKEYNIGVLRHLQVIFGHLAASQLQYYVPRGFWKQFRLWGEPVNLREQHDALEFFNSLVDSLDEALKALGHPAILSKVLGGSFADQKICQGCPHRYECEESFTTLNVDIRNHQNLLDSLEQYIKGDLLEGANAYHCEKCDKKVDTVKRLLIKKLPRVLAIQLKRFDYDWERECAIKFNDYFEFPRELDMGPYTVAGVANLERDNVNSENELIEQKEQSDNETAGGTKYRLVGVLVHSGQASGGHYYSYIIQRNGKDDQTDHWYKFDDGDVTECKMDDDEEMKNQCFGGEYMGEVFDHMMKRMSYRRQKRWWNAYILFYEQMDMIDEDDEMIRYISELTIARPHQIIMSPAIERSVRKQNVKFMHNRLQYSLEYFQFVKKLLTCNGVYLNPAPGQDYLLPEAEEITMISIQLAARFLFTTGFHTKKIVRGPASDWYDALCVLLRHSKNVRFWFTHNVLFNVSNRFSEYLLECPSAEVRGAFAKLIVFIAHFSLQDGSCPSPFASPGPSSQACDNLSLSDHLLRATLNLLRREVSEHGHHLQQYFNLFVMYANLGVAEKTQLLKLNVPATFMLVSLDEGPGPPIKYQYAELGKLYSVVSQLIRCCNVSSTMQSSINGNPPLPNPFGDLNLSQPIMPIQQNVLDILFVRTSYVKKIIEDCSNSEDTIKLLRFCSWENPQFSSTVLSELLWQVAYSYTYELRPYLDLLFQILLIEDSWQTHRIHNALKGIPDDRDGLFDTIQRSKNHYQKRAYQCIKCMVALFSSCPVAYQILQGNGDLKRKWTWAVEWLGDELERRPYTGNPQYSYNNWSPPVQSNETANGYFLERSHSARMTLAKACELCPEEEPDDQDAPDEHEPSPSEDAPLYPHSPASQYQQNNHVHGQPYTGPAAHHLNNPQKTGQRTQENYEGNEEVSSPQMKDQ

SEQ ID NO: 928 - protein, 3433 aa, Homo sapiens
MAKYGEHEASPDNGQNEFSDIIKSRSDEHNDVQKKTFTKWINARFSKSGKPPINDMFTDLKDGRKLLDLLEGLTGTSLPKERGSTRVHALNNVNRVLQVLHQNNVELVNIGGTDIVDGNHKLTLGLLWSIILHWQVKDVMKDVMSDLQQTNSEKILLSWVRQTTRPYSQVNVLNFTTSWTDGLAFNAVLHRHKPDLFSWDKVVKMSPIERLEHAFSKAQTYLGIEKLLDPEDVAVQLPDKKSIIMYLTSLFEVLPQQVTIDAIREVETLPRKYKKECEEEAINIQSTAPEEEHESPRAETPSTVTEVDMDLDSYQIALEEVLTWLLSAEDTFQEQDDISDDVEEVKDQFATHEAFMMELTAHQSSVGSVLQAGNQLITQGTLSDEEEFEIQEQMTLLNARWEALRVESMDRQSRLHDVLMELQKKQLQQLSAWLTLTEERIQKMETCPLDDDVKSLQKLLEEHKSLQSDLEAEQVKVNSLTHMVVIVDENSGESATAILEDQLQKLGERWTAVCRWTEERWNRLQEINILWQELLEEQCLLKAWLTEKEEALNKVQTSNFKDQKELSVSVRRLAILKEDMEMKRQTLDQLSEIGQDVGQLLDNSKASKKINSDSEELTQRWDSLVQRLEDSSNQVTQAVAKLGMSQIPQKDLLETVRVREQAITKKSKQELPPPPPPKKRQIHVDIEAKKKFDAISAELLNWILKWKTAIQTTEIKEYMKMQDTSEMKKKLKALEKEQRERIPRADELNQTGQILVEQMGKEGLPTEEIKNVLEKVSSEWKNVSQHLEDLERKIQLQEDINAYFKQLDELEKVIKTKEEWVKHTSISESSRQSLPSLKDSCQRELTNLLGLHPKIEMARASCSALMSQPSAPDFVQRGFDSFLGRYQAVQEAVEDRQQHLENELKGQPGHAYLETLKTLKDVLNDSENKAQVSLNVLNDLAKVEKALQEKKTLDEILENQKPALHKLAEETKALEKNVHPDVEKLYKQEFDDVQGKWNKLKVLVSKDLHLLEEIALTLRAFEADSTVIEKWMDGVKDFLMKQQAAQGDDAGLQRQLDQCSAFVNEIETIESSLKNMKEIETNLRSGPVAGIKTWVQTRLGDYQTQLEKLSKEIATQKSRLSESQEKAANLKKDLAEMQEWMTQAEEEYLERDFEYKSPEELESAVEEMKRAKEDVLQKEVRVKILKDNIKLLAAKVPSGGQELTSELNVVLENYQLLCNRIRGKCHTLEEVWSCWIELLHYLDLETTWLNTLEERMKSTEVLPEKTDAVNEALESLESVLRHPADNRTQIRELGQTLIDGGILDDIISEKLEAFNSRYEDLSHLAESKQISLEKQLQVLRETDQMLQVLQESLGELDKQLTTYLTDRIDAFQVPQEAQKIQAEISAHELTLEELRRNMRSQPLTSPESRTARGGSQMDVLQRKLREVSTKFQLFQKPANFEQRMLDCKRVLDGVKAELHVLDVKDVDPDVIQTHLDKCMKLYKTLSEVKLEVETVIKTGRHIVQKQQTDNPKGMDEQLTSLKVLYNDLGAQVTEGKQDLERASQLARKMKKEAASLSEWLSATETELVQKSTSEGLLGDLDTEISWAKNVLKDLEKRKADLNTITESSAALQNLIEGSEPILEERLCVLNAGWSRVRTWTEDWCNTLMNHQNQLEIFDGNVAHISTWLYQAEALLDEIEKKPTSKQEEIVKRLVSELDDANLQVENVRDQALILMNARGSSSRELVEPKLAELNRNFEKVSQHIKSAKLLIAQEPLYQCLVTTETFETGVPFSDLEKLENDIENMLKFVEKHLESSDEDEKMDEESAQIEEVLQRGEEMLHQPMEDNKKEKIRLQLLLLHTRYNKIKAIPIQQRKMGQLASGIRSSLLPTDYLVEINKILLCMDDVELSLNVPELNTAIYEDFSFQEDSLKNIKDQLDKLGEQIAVIHEKQPDVILEASGPEAIQIRDTLTQLNAKWDRINRMYSDRKGCFDRAMEEWRQFHCDLNDLTQWITEAEELLVDTCAPGGSLDLEKARIHQQELEVGISSHQPSFAALNRTGDGIVQKLSQADGSFLKEKLAGLNQRWDAIVAEVKDRQPRLKGESKQVMKYRHQLDEIICWLTKAEHAMQKRSTTELGENLQELRDLTQEMEVHAEKLKWLNRTELEMLSDKSLSLPERDKISESLRTVNMTWNKICREVPTTLKECIQEPSSVSQTRIAAHPNVQKVVLVSSASDIPVQSHRTSEISIPADLDKTITELADWLVLIDQMLKSNIVTVGDVEEINKTVSRMKITKADLEQRHPQLDYVFTLAQNLKNKASSSDMRTAITEKLERVKNQWDGTQHGVELRQQQLEDMIIDSLQWDDHREETEELMRKYEARLYILQQARRDPLTKQISDNQILLQELGPGDGIVMAFDNVLQKLLEEYGSDDTRNVKETTEYLKTSWINLKQSIADRQNALEAEWRTVQASRRDLENFLKWIQEAETTVNVLVDASHRENALQDSILARELKQQMQDIQAEIDAHNDIFKSIDGNRQKMVKALGNSEEATMLQHRLDDMNQRWNDLKAKSASIRAHLEASAEKWNRLLMSLEELIKWLNMKDEELKKQMPIGGDVPALQLQYDHCKALRRELKEKEYSVLNAVDQARVFLADQPIEAPEEPRRNLQSKTELTPEERAQKIAKAMRKQSSEVKEKWESLNAVTSNWQKQVDKALEKLRDLQGAMDDLDADMKEAESVRNGWKPVGDLLIDSLQDHIEKIMAFREEIAPINFKVKTVNDLSSQLSPLDLHPSLKMSRQLDDLNMRWKLLQVSVDDRLKQLQEAHRDFGPSSQHFLSTSVQLPWQRSISHNKVPYYINHQTQTTCWDHPKMTELFQSLADLNNVRFSAYRTAIKIRRLQKALCLDLLELSTTNEIFKQHKLNQNDQLLSVPDVINCLTTTYDGLEQMHKDLVNVPLCVDMCLNWLLNVYDTGRTGKIRVQSLKIGLMSLSKGLLEEKYRYLFKEVAGPTEMCDQRQLGLLLHDAIQIPRQLGEVAAFGGSNIEPSVRSCFQQNNNKPEISVKEFIDWMHLEPQSMVWLPVLHRVAAAETAKHQAKCNICKECPIVGFRYRSLKHFNYDVCQSCFFSGRTAKGHKLHYPMVEYCIPTTSGEDVRDFTKVLKNKFRSKKYFAKHPRLGYLPVQTVLEGDNLETPITLISMWPEHYDPSQSPQLFHDDTHSRIEQYATRLAQMERTNGSFLTDSSSTTGSVEDEHALIQQYCQTLGGESPVSQPQSPAQILKSVEREERGELERIIADLEEEQRNLQVEYEQLKDQHLRRGLPVGSPPESIISPHHTSEDSELIAEAKLLRQHKGRLEARMQILEDHNKQLESQLHRLRQLLEQPESDSRINGVSPWASPQHSALSYSLDPDASGPQFHQAAGEDLLAPPHDTSTDLTEVMEQIHSTFPSCCPNVPSRPQAM

SEQ ID NO: 929 - protein, 365 aa, Homo sapiens
MPGGKKVAGGGSSGATPTSAAATAPSGVRRLETSEGTSAQRDEEPEEEGEEDLRDGGVPFFVNRGGLPVDEATWERMWKHVAKIHPDGEKVAQRIRGATDLPKIPIPSVPTFQPSTPVPERLEAVQRYIRELQYNHTGTQFFEIKKSRPLTGLMDLAKEMTKEALPIKCLEAVILGIYLTNSMPTLERFPISFKTYFSGNYFRHIVLGVNFAGRYGALGMSRREDLMYKPPAFRTLSELVLDFEAAYGRCWHVLKKVKLGQSVSHDPHSVEQIEWKHSVLDVERLGRDDFRKELERHARDMRLKIGKGTGPPSPTKDRKKDVSSPQRAQSSPHRRNSRSERRPSGDKKTSEPKAMPDLNGYQIRV

SEQ ID NO: 930 - protein, 827 aa, Homo sapiens
MTKLSAQVKGSLNITTPGLQIWRIEAMQMVPVPSSTFGSFFDGDCYIILAIHKTASSLSYDIHYWIGQDSSLDEQGAAAIYTTQMDDFLKGRAVQHREVQGNESEAFRGYFKQGLVIRKGGVASGMKHVETNSYDVQRLLHVKGKRNVVAGEVEMSWKSFNRGDVFLLDLGKLIIQWNGPESTRMERLRGMTLAKEIRDQERGGRTYVGVVDGENELASPKLMEVMNHVLGKRRELKAAVPDTVVEPALKAALKLYHVSDSEGNLVVREVATRPLTQDLLSHEDCYILDQGGLKIYVWKGKKANEQEKKGAMSHALNFIKAKQYPPSTQVEVQNDGAESAVFQQLFQKWTASNRTSGLGKTHTVGSVAKVEQVKFDATSMHVKPQVAAQQKMVDDGSGEVQVWRIENLELVPVDSKWLGHFYGGDCYLLLYTYLIGEKQHYLLYVWQGSQASQDEITASAYQAVILDQKYNGEPVQIRVPMGKEPPHLMSIFKGRMVVYQGGTSRTNNLETGPSTRLFQVQGTGANNTKAFEVPARANFLNSNDVFVLKTQSCCYLWCGKGCSGDEREMAKMVADTISRTEKQVVVEGQEPANFWMALGGKAPYANTKRLQEENLVITPRLFECSNKTGRFLATEIPDFNQDDLEEDDVFLLDVWDQVFFWIGKHANEEEKKAAATTAQEYLKTHPSGRDPETPIIVVKQGHEPPTFTGWFLAWDPFKWSNTKSYEDLKAELGNSRDWSQITAEVTSPKVDVFNANSNLSSGPLPIFPLEQLVNKPVEELPEGVDPSRKEEHLSIEDFTQAFGMTPAAFSALPRWKQQNLKKEKGLF

SEQ ID NO: 931 - protein, 170 aa, Homo sapiens
MDTRNKAQLLVLLTLLSVLFSQTSAWPLYRAPSALRLGDRIPFEGANEPDQVSLKEDIDMLQNALAENDTPYYDVSRNARHADGVFTSDFSKLLGQLSAKKYLESLMGKRVSSNISEDPVPVKRHSDAVFTDNYTRLRKQMAVKKYLNSILNGKRSSEGESPDFPEELEK

SEQ ID NO: 932 - protein, 873 aa, Homo sapiens
MGTSALWALWLLLALCWAPRESGATGTGRKAKCEPSQFQCTNGRCITLLWKCDGDEDCVDGSDEKNCVKKTCAESDFVCNNGQCVPSRWKCDGDPDCEDGSDESPEQCHMRTCRIHEISCGAHSTQCIPVSWRCDGENDCDSGEDEENCGNITCSPDEFTCSSGRCISRNFVCNGQDDCSDGSDELDCAPPTCGAHEFQCSTSSCIPISWVCDDDADCSDQSDESLEQCGRQPVIHTKCPASEIQCGSGECIHKKWRCDGDPDCKDGSDEVNCPSRTCRPDQFECEDGSCIHGSRQCNGIRDCVDGSDEVNCKNVNQCLGPGKFKCRSGECIDISKVCNQEQDCRDWSDEPLKECHINECLVNNGGCSHICKDLVIGYECDCAAGFELIDRKTCGDIDECQNPGICSQICINLKGGYKCECSRGYQMDLATGVCKAVGKEPSLIFTNRRDIRKIGLERKEYIQLVEQLRNTVALDADIAAQKLFWADLSQKAIFSASIDDKVGRHVKMIDNVYNPAAIAVDWVYKTIYWTDAASKTISVATLDGTKRKFLFNSDLREPASIAVDPLSGFVYWSDWGEPAKIEKAGMNGFDRRPLVTADIQWPNGITLDLIKSRLYWLDSKLHMLSSVDLNGQDRRIVLKSLEFLAHPLALTIFEDRVYWIDGENEAVYGANKFTGSELATLVNNLNDAQDIIVYHELVQPSGKNWCEEDMENGGCEYLCLPAPQINDHSPKYTCSCPSGYNVEENGRDCQSTATTVTYSETKDTNTTEISATSGLVPGGINVTTAVSEVSVPPKGTSAAWAILPLLLLVMAAVGGYLMWRNWQHKNMKSMNFDNPVYLKTTEEDLSIDIGRHSASVGHTYPAISVVSTDDDLA

SEQ ID NO: 933 - protein, 4022 aa, Homo sapiens
MLESYVTPILMSYVNRYIKNLKPSDLQLSLWGGDVVLSKLELKLDVLEQELKLPFTFLSGHIHELRIHVPWTKLGSEPVVITINTMECILKLKDGIQDDHESCGSNSTNRSTAESTKSSIKPRRMQQAAPTDPDLPPGYVQSLIRRVVNNVNIVINNLILKYVEDDIVLSVNITSAECYTVGELWDRAFMDISATDLVLRKVINFSDCTVCLDKRNASGKIEFYQDPLLYKCSFRTRLHFTYENLNSKMPSVIKIHTLVESLKLSITDQQLPMFIRIMQLGIALYYGEIGNFKEGEIEDLTCHNKDMLGNITGSEDETRIDMQYPAQHKGQELYSQQDEEQPQGWVSWAWSFVPAIVSYDDGEEDFVGNDPASTMHQQKAQTLKDPIVSIGFYCTKATVTFKLTEMQVESSYYSPQKVKSKEVLCWEQEGTTVEALMMGEPFFDCQIGFVGCRAMCLKGIMGVKDFEENMNRSETEACFFICGDNLSTKGFTYLTNSLFDYRSPENNGTRAEFILDSTHHKETYTEIAGMQRFGAFYMDYLYTMENTSGKGSTNQQDFSSGKSEDLGTVQEKSTKSLVIGPLDFRLDSSAVHRILKMIVCALEHEYEPYSRLKSDIKDENETILNPEEVALLEEYIPTRHTSVTLLKCTCTISMAEFNLLDHLLPVIMGEKNSSNFMNTTNFQSLRPLPSIRILVDKINLEHSVPMYAEQLVHVVSSLTQPSDNLLHYCYVHCYLKIFGFQAGLTSLDCSGSYCLPVPVIPSFSTALYGKLLKLPTCWTKRSQIAITEGIFELPNLTIQATRAQTLLLQAIYQSWSHLGNVSSSAVIEALINEIFLSIGVKSKNPLPTLEGSIQNVELKYCSTSLVKCASGTMGSIKICAKAPVDSGKEKLIPLLQGPSDTKDLHSTKWLNESRKPESLLAPDLMAFTIQVPQYIDYCHNSGAVLLCSIQGLAVNIDPILYTWLIYQPQKRTSRHMQQQPVVAVPLVMPVCRRKEDEVSIGSAPLAKQQSYQASEYASSPVKTKTVTESRPLSVPVKAMLNISESCRSPEERMKEFIGIVWNAVKHLTLQLEVQSCCVFIPNDSLPSPSTIVSGDIPGTVRSWYHGQTSMPGTLVLCLPQIKIISAGHKYMEPLQEIPFVIPRPILEEGDAFPWTISLHNFSIYTLLGKQVTLCLVEPMGCTSTLAVTSQKLLATGPDTRHSFVVCLHVDLESLEIKCSNPQVQLFYELTDIMNKVWNKIQKRGNLNLSPTSPETMAGPVPTSPVRSSIGTAPPDTSTCSPSADIGTTTEGDSIQAGEESPFSDSVTLEQTTSNIGGTSGRVSLWMQWVLPKITIKLFAPDPENKGTEVCMVSELEDLSASIDVQDVYTKVKCKIESFNIDHYRSSLGEECWSLGQCGGVFLSCTDKLNRRTLLVRPISKQDPFSNCSGFFPSTTTKLLDGTHQQHGFLSLTYTKAVTKNVRHKLTSRNERRSFHKLSEGLMDGSPHFLHEILLSAQAFDIVLYFPLLNAIASIFQAKLPKTQKEKRKSPGQPMRTHTLTSRNLPLIYVNTSVIRIFIPKTEEMQPTVEANQAAKEDTVVLKIGSVAMAPQADNPLGRSVLRKDIYQRALNLGILRDPGSEIEDRQYQIDLQSINIGTAQWHQLKPEKESVSGGVVTETERNSQNPALEWNMASSIRRHQERRAILTPVLTDFSVRITGAPAVIFTKVVSPENLHTEEILVCGHSLEVNITTNLDFFLSVAQVQLLHQLIVANMTGLEPSNKAAEISKQEQKKVDIFDGGMAETSSRYSGAQDSGIGSDSVKIRIVQIEQHSGASQHRIARPSRQSSIVKNLNFIPFDIFITASRISLMTYSCMALSKSKSQEQKNNEKTDKSSLNLPEVDSDVAKPNQACISTVTAEDLLRSSISFPSGKKIGVLSLESLHASTRSSARQALGITIVRQPGRRGTGDLQLEPFLYFIVSQPSLLLSCHHRKQRVEVSIFDAVLKGVASDYKCIDPGKTLPEALDYCTVWLQTVPGEIDSKSGIPPSFITLQIKDFLNGPADVNLDISKPLKANLSFTKLDQINLFLKKIKNAHSLAHSEETSAMSNTMVNKDDLPVSKYYRGKLSKPKIHGDGVQKISAQENMWRAVSCFQKISVQTTQIVISMETVPHTSKPCLLASLSNLNGSLSVKATQKVPGIILGSSFLLSINDFLLKTSLKERSRILIGPCCATANLEAKWCKHSGNPGPEQSIPKISIDLRGGLLQVFWGQEHLNCLVLLHELLNGYLNEEGNFEVQVSEPVPQMSSPVEKNQTFKSEQSSDDLRTGLFQYVQDAESLKLPGVYEVLFYNETEDCPGMMLWRYPEPRVLTLVRITPVPFNTTEDPDISTADLGDVLQVPCSLEYWDELQKVFVAFREFNLSESKVCELQLPDINLVNDQKKLVSSDLWRIVLNSSQNGADDQSSASESGSQSTCDPLVTPTALAACTRVDSCFTPWFVPSLCVSFQFAHLEFHLCHHLDQLGTAAPQYLQPFVSDRNMPSELEYMIVSFREPHMYLRQWNNGSVCQEIQFLAQADCKLLECRNVTMQSVVKPFSIFGQMAVSSDVVEKLLDCTVIVDSVFVNLGQHVVHSLNTAIQAWQQNKCPEVEELVFSHFVICNDTQETLRFGQVDTDENILLASLHSHQYSWRSHKSPQLLHICIEGWGNWRWSEPFSVDHAGTFIRTIQYRGRTASLIIKVQQLNGVQKQIIICGRQIICSYLSQSIELKVVQHYIGQDGQAVVREHFDCLTAKQKLPSYILENNELTELCVKAKGDEDWSRDVCLESKAPEYSIVIQVPSSNSSIIYVWCTVLTLEPNSQVQQRMIVFSPLFIMRSHLPDPIIIHLEKRSLGLSETQIIPGKGQEKPLQNIEPDLVHHLTFQAREEYDPSDCAVPISTSLIKQIATKVHPGGTVNQILDEFYGPEKSLQPIWPYNKKDSDRNEQLSQWDSPMRVKLSIWKPYVRTLLIELLPWALLINESKWDLWLFEGEKIVLQVPAGKIIIPPNFQEAFQIGIYWANTNTVHKSVAIKLVHNLTSPKWKDGGNGEVVTLDEEAFVDTEIRLGAFPGHQKLCQFCISSMVQQGIQIIQIEDKTTIINNTPYQIFYKPQLSVCNPHSGKEYFRVPDSATFSICPGGEQPAMKSSSLPCWDLMPDISQSVLDASLLQKQIMLGFSPAPGADSSQCWSLPAIVRPEFPRQSVAVPLGNFRENGFCTRAIVLTYQEHLGVTYLTLSEDPSPRVIIHNRCPVKMLIKENIKDIPKFEVYCKKIPSECSIHHELYHQISSYPDCKTKDLLPSLLLRVEPLDEVTTEWSDAIDINSQGTQVVFLTGFGYVYVDVVHQCGTVFITVAPEGKAGPILTNTNRAPEKIVTFKMFITQLSLAVFDDLTHHKASAELLRLTLDNIFLCVAPGAGPLPGEEPVAALFELYCVEICCGDLQLDNQLYNKSNFHFAVLVCQGEKAEPIQCSKMQSLLISNKELEEYKEKCFIKLCITLNEGKSILCDINEFSFELKPARLYVEDTFVYYIKTLFDTYLPNSRLAGHSTHLSGGKQVLPMQVTQHARALVNPVKLRKLVIQPVNLLVSIHASLKLYIASDHTPLSFSVFERGPIFTTARQLVHALAMHYAAGALFRAGWVVGSLDILGSPASLVRSIGNGVADFFRLPYEGLTRGPGAFVSGVSRGTTSFVKHISKGTLTSITNLATSLARNMDRLSLDEEHYNRQEEWRRQLPESLGEGLRQGLSRLGISLLGAIAGIVDQPMQNFQKTSEAQASAGHKAKGVISGVGKGIMGVFTKPIGGAAELVSQTGYGILHGAGLSQLPKQRHQPSDLHADQAPNSHVKYVWKMLQSLGRPEVHMALDVVLVRGSGQEHEGCLLLTSEVLFVVSVSEDTQQQAFPVTEIDCAQDSKQNNLLTVQLKQPRVACDVEVDGVRERLSEQQYNRLVDYITKTSCHLAPSCSSMQIPCPVVAAEPPPSTVKTYHYLVDPHFAQVFLSKFTMVKNKALRKGFP

SEQ ID NO: 934 - protein, 399 aa, Homo sapiens
MGILLGLLLLGHLTVDTYGRPILEVPESVTGPWKGDVNLPCTYDPLQGYTQVLVKWLVQRGSDPVTIFLRDSSGDHIQQAKYQGRLHVSHKVPGDVSLQLSTLEMDDRSHYTCEVTWQTPDGNQVVRDKITELRVQKLSVSKPTVTTGSGYGFTVPQGMRISLQCQARGSPPISYIWYKQQTNNQEPIKVATLSTLLFKPAVIADSGSYFCTAKGQVGSEQHSDIVKFVVKDSSKLLKTKTEAPTTMTYPLKATSTVKQSWDWTTDMDGYLGETSAGPGKSLPVFAIILIISLCCMVVFTMAYIMLCRKTSQQEHVYEAARAHAREANDSGETMRVAIFASGCSSDEPTSQNLGNNYSDEPCIGQEYQIIAQINGNYARLLDTVPLDYEFLATEGKSVC

SEQ ID NO: 935 - protein, 647 aa, Homo sapiens
MVMYARKQQRLSDGCHDRRGDSQPYQALKYSSKSHPSSGDHRHEKMRDAGDPSPPNKMLRRSDSPENKYSDSTGHSKAKNVHTHRVRERDGGTSYSPQENSHNHSALHSSNSHSSNPSNNPSKTSDAPYDSADDWSEHISSSGKKYYYNCRTEVSQWEKPKEWLEREQRQKEANKMAVNSFPKDRDYRREVMQATATSGFASGMEDKHSSDASSLLPQNILSQTSRHNDRDYRLPRAETHSSSTPVQHPIKPVVHPTATPSTVPSSPFTLQSDHQPKKSFDANGASTLSKLPTPTSSVPAQKTERKESTSGDKPVSHSCTTPSTSSASGLNPTSAPPTSASAVPVSPVPQSPIPPLLQDPNLLRQLLPALQATLQLNNSNVDISKINEVLTAAVTQASLQSIIHKFLTAGPSAFNITSLISQAAQLSTQAQPSNQSPMSLTSDASSPRSYVSPRISTPQTNTVPIKPLISTPPVSSQPKVSTPVVKQGPVSQSATQQPVTADKQQGHEPVSPRSLQRSSSQRSPSPGPNHTSNSSNASNATVVPQNSSARSTCSLTPALAAHFSENLIKHVQGWPADHAEKQASRLREEAHNMGTIHMSEICTELKNLRSLVRVCEIQATLREQRILFLRQQIKELEKLKNQNSFMV

SEQ ID NO: 936 - protein, 3526 aa, Homo sapiens
MNMVKRIMGRPRQEECSPQDNALGLMHLRRLFTELCHPPRHMTQKEQEEKLYMMLPVFNRVFGNAPPNTMTEKFSDLLQFTTQVSRLMVTEIRRRASNKSTEAASRAIVQFLEINQSEEASRGWMLLTTINLLASSGQKTVDCMTTMSVPSTLVKCLYLFFDLPHVPEAVGGAQNELPLAERRGLLQKVFVQILVKLCSFVSPAEELAQKDDLQLLFSAITSWCPPYNLPWRKSAGEVLMTISRHGLSVNVVKYIHEKECLSTCVQNMQQSDDLSPLEIVEMFAGLSCFLKDSSDVSQTLLDDFRIWQGYNFLCDLLLRLEQAKEAESKDALKDLVNLITSLTTYGVSELKPAGITTGAPFLLPGFAVPQPAGKGHSVRNVQAFAVLQNAFLKAKTSFLAQIILDAITNIYMADNANYFILESQHTLSQFAEKISKLPEVQNKYFEMLEFVVFSLNYIPCKELISVSILLKSSSSYHCSIIAMKTLLKFTRHDYIFKDVFREVGLLEVMVNLLHKYAALLKDPTQALNEQGDSRNNSSVEDQKHLALLVMETLTVLLQGSNTNAGIFREFGGARCAHNIVKYPQCRQHALMTIQQLVLSPNGDDDMGTLLGLMHSAPPTELQLKTDILRALLSVLRESHRSRTVFRKVGGFVYITSLLVAMERSLSCPPKNGWEKVNQNQVFELLHTVFCTLTAAMRYEPANSHFFKTEIQYEKLADAVRFLGCFSDLRKISAMNVFPSNTQPFQRLLEEDVISIESVSPTLRHCSKLFIYLYKVATDSFDSRAEQIPPCLTSESSLPSPWGTPALSRKRHAYHSVSTPPVYPPKNVADLKLHVTTSSLQSSDAVIIHPGAMLAMLDLLASVGSVTQPEHALDLQLAVANILQSLVHTERNQQVMCEAGLHARLLQRCSAALADEDHSLHPPLQRMFERLASQALEPMVLREFLRLASPLNCGAWDKKLLKQYRVHKPSSLSYEPEMRSSMITSLEGLGTDNVFSLHEDNHYRISKSLVKSAEGSTVPLTRVKCLVSMTTPHDIRLHGSSVTPAFVEFDTSLEGFGCLFLPSLAPHNAPTNNTVTTGLIDGAVVSGIGSGERFFPPPSGLSYSSWFCIEHFSSPPNNHPVRLLTVVRRANSSEQHYVCLAIVLSAKDRSLIVSTKEELLQNYVDDFSEESSFYEILPCCARFRCGELIIEGQWHHLVLVMSKGMLKNSTAALYIDGQLVNTVKLHYVHSTPGGSGSANPPVVSTVYAYIGTPPAQRQIASLVWRLGPTHFLEEVLPSSNVTTIYELGPNYVGSFQAVCMPCKDAKSEGVVPSPVSLVPEEKVSFGLYALSVSSLTVARIRKVYNKLDSKAIAKQLGISSHENATPVKLIHNSAGHLNGSARTIGAALIGYLGVRTFVPKPVATTLQYVGGAAAILGLVAMASDVEGLYAAVKALVCVVKSNPLASKEMERIKGYQLLAMLLKKKRSLLNSHILHLTFSLVGTVDSGHETSIIPNSTAFQDLLCDFEVWLHAPYELHLSLFEHFIELLTESSEASKNAKLMREFQLIPKLLLTLRDMSLSQPTIAAISNVLSFLLQGFPSSNDLLRFGQFISSTLPTFAVCEKFVVMEINNEEKLDTGTEEEFGGLVSANLILLRNRLLDILLKLIYTSKEKTSINLQACEELVKTLGFDWIMMFMEEHLHSTTVTAAMRILVVLLSNQSILIKFKEGLSGGGWLEQTDSVLTNKIGTVLGFNVGRSAGGRSTVREINRDACHFPGFPVLQSFLPKHTNVPALYFLLMALFLQQPVSELPENLQVSVPVISCRSKQGCQFDLDSIWTFIFGVPASSGTVVSSIHNVCTEAVFLLLGMLRSMLTSPWQSEEEGSWLREYPVTLMQFFRYLYHNVPDLASMWMSPDFLCALAATVFPFNIRPYSEMVTDLDDEVGSPAEEFKAFAADTGMNRSQSEYCNVGTKTYLTNHPAKKFVFDFMRVLIIDNLCLTPASKQTPLIDLLLEASPERSTRTQQKEFQTYILDSVMDHLLAADVLLGEDASLPITSGGSYQVLVNNVFYFTQRVVDKLWQGMFNKESKLLIDFIIQLIAQSKRRSQGLSLDAVYHCLNRTILYQFSRAHKTVPQQVALLDSLRVLTVNRNLILGPGNHDQEFISCLAHCLINLHVGSNVDGFGLEAEARMTTWHIMIPSDIEPDGSYSQDISEGRQLLIKAVNRVWTELIHSKKQVLEELFKVTLPVNERGHVDIATARPLIEEAALKCWQNHLAHEKKCISRGEALAPTTQSKLSRVSSGFGLSKLTGSRRNRKESGLNKHSLSTQEISQWMFTHIAVVRDLVDTQYKEYQERQQNALKYVTEEWCQIECELLRERGLWGPPIGSHLDKWMLEMTEGPCRMRKKMVRNDMFYNHYPYVPETEQETNVASEIPSKQPETPDDIPQKKPARYRRAVSYDSKEYYMRLASGNPAIVQDAIVESSEGEAAQQEPEHGEDTIAKVKGLVKPPLKRSRSAPDGGDEENQEQLQDQIAEGSSIEEEEKTDNATLLRLLEEGEKIQHMYRCARVQGLDTSEGLLLFGKEHFYVIDGFTMTATREIRDIETLPPNMHEPIIPRGARQGPSQLKRTCSIFAYEDIKEVHKRRYLLQPIAVEVFSGDGRNYLLAFQKGIRNKVYQRFLAVVPSLTDSSESVSGQRPNTSVEQGSGLLSTLVGEKSVTQRWERGEISNFQYLMHLNTLAGRSYNDLMQYPVFPWILADYDSEEVDLTNPKTFRNLAKPMGAQTDERLAQYKKRYKDWEDPNGETPAYHYGTHYSSAMIVASYLVRMEPFTQIFLRLQGGHFDLADRMFHSVREAWYSASKHNMADVKELIPEFFYLPEFLFNSNNFDLGCKQNGTKLGDVILPPWAKGDPREFIRVHREALECDYVSAHLHEWIDLIFGYKQQGPAAVEAVNVFHHLFYEGQVDIYNINDPLKETATIGFINNFGQIPKQLFKKPHPPKRVRSRLNGDNAGISVLPGSTSDKIFFHHLDNLRPSLTPVKELKEPVGQIVCTDKGILAVEQNKVLIPPTWNKTFAWGYADLSCRLGTYESDKAMTVYECLSEWGQILCAICPNPKLVITGGTSTVVCVWEMGTSKEKAKTVTLKQALLGHTDTVTCATASLAYHIIVSGSRDRTCIIWDLNKLSFLTQLRGHRAPVSALCINELTGDIVSCAGTYIHVWSINGNPIVSVNTFTGRSQQIICCCMSEMNEWDTQNVIVTGHSDGVVRFWRMEFLQVPETPAPEPAEVLEMQEDCPEAQIGQEAQDEDSSDSEADEQSISQDPKDTPSQPSSTSHRPRAASCRATAAWCTDSGSDDSRRWSDQLSLDEKDGFIFVNYSEGQTRAHLQGPLSHPHPNPIEVRNYSRLKPGYRWERQLVFRSKLTMHTAFDRKDNAHPAEVTALGISKDHSRILVGDSRGRVFSWSVSDQPGRSAADHWVKDEGGDSCSGCSVRFSLTERRHHCRNCGQLFCQKCSRFQSEIKRLKISSPVRVCQNCYYNLQHERGSEDGPRNC

SEQ ID NO: 937 - protein, 686 aa, Homo sapiens
MSFPRGSQTQKIKHPIGTRKGPLEVPPPTEKDWPKDDEQDHVLVDPDEELDSLPQPYRMINKLVNLLFDQSWEIIEERNALREAESSQIQPTVYPPLGEIQLNKMPNCMAVSQDYVFIGGAKGFSIYNLYSAKQIYAWEKLKVDVTSIWATDLGNEILIAPVDEMGIIRLFYFYKEGLYLVKAINEVDDTSKQTTCIKMEISQGGDFAAFLLQGAGDIWLDVYKLPKETWLKKLEHPQLTSNPKKKVRQPQLNSLGPISADPLEMDANVSFKGDIKLSLPVYIMKIKPPKPVTGTTFKSPLEVFAKIKDCYGLGSGQNHFIKDSQWEQQAEIFNASYKKYLDREWEEEPLSTATFYFLLPSCLFAMPPEVKGPSGMACVLGIHWTRSHNFFLYSLNRTLKDKADPEGVWPCAAPIAVSQLSCSSSYLVLACEDGVLTLWDLAKGFPLGVAALPQGCFCQSIHFLKYFSVHKGQNMYPEGQVKSQMKCVVLCTDASLHLVEASGTQGPTISVLVERPVKHLDKTICAVAPVPALPGMVLIFSKNGSVCLMDVAKREIICAFAPPGAFPLEVPWKPVFAVSPDHPCFLLRGDYSHETASTDDAGIQYSVFYFNFEACPLLENISKNCTIPQRDLDNMAFPQALPLEKRCERFLQKSYRKLEKNPEKEEEHWARLQRYSLSLQRENFKK

SEQ ID NO: 938 - protein, 1800 aa, Homo sapiens
MATDSGDPASTEDSEKPDGISFENRVPQVAATLTVEARLKEKNSTFSASGETVERKRFFRKSVEMTEDDKVAESSPKDERIKAAMNIPRVDKLPSNVLRGGQEVKYEQCSKSTSEISKDCFKEKNEKEMEEEAEMKAVATSPSGRFLKFDIELGRGAFKTVYKGLDTETWVEVAWCELQDRKLTKAEQQRFKEEAEMLKGLQHPNIVRFYDSWESILKGKKCIVLVTELMTSGTLKTYLKRFKVMKPKVLRSWCRQILKGLQFLHTRTPPIIHRDLKCDNIFITGPTGSVKIGDLGLATLMRTSFAKSVIGTPEFMAPEMYEEHYDESVDVYAFGMCMLEMATSEYPYSECQNAAQIYRKVTSGIKPASFNKVTDPEVKEIIEGCIRQNKSERLSIRDLLNHAFFAEDTGLRVELAEEDDCSNSSLALRLWVEDPKKLKGKHKDNEAIEFSFNLETDTPEEVAYEMVKSGFFHESDSKAVAKSIRDRVTPIKKTREKKPAGCLEERRDSQCKSMGNVFPQPQNTTLPLAPAQQTGAECEETEVDQHVRQQLLQRKPQQHCSSVTGDNLSEAGAASVIHSDTSSQPSVAYSSNQTMGSQMVSNIPQAEVNVPGQIYSSQQLVGHYQQVSGLQKHSKLTQPQILPLVQGQSTVLPVHVLGPTVVSQPQVSPLTVQKVPQIKPVSQPVGAEQQAALLKPDLVRSLNQDVATTKENVSSPDNPSGNGKQDRIKQRRASCPRPEKGTKFQLTVLQVSTSGDNMVECQLETHNNKMVTFKFDVDGDAPEDIADYMVEDNFVLESEKEKFVEELRAIVGQAQEILHVHFATERATGVDSITVDSNSSQTGSSEQVQINSTSTQTSNESAPQSSPVGRWRFCINQTIRNRETQSPPSLQHSMSAVPGRHPLPSPKNTSNKEISRDTLLTIENNPCHRALFTSKSEHKDVVDGKISECASVETKQPAILYQVEDNRQIMAPVTNSSSYSTTSVRAVPAECEGLTKQASIFIPVYPCHQTASQADALMSHPGESTQTSGNSLTTLAFDQKPQTLSVQQPAMDAEFISQEGETTVNTEASSPKTVIPTQTPGLEPTTLQPTTVLESDGERPPKLEFADNRIKTLDEKLRNLLYQEHSISSIYPESQKDTQSIDSPFSSSAEDTLSCPVTEVIAISHCGIKDSPVQSPNFQQTGSKLLSNVAASQPANISVFKRDLNVITSVPSELCLHEMSSDASLPGDPEAYPAAVSSGGAIHLQTGGGYFGLSFTCPSLKNPISKKSWTRKLKSWAYRLRQSTSFFKRSKVRQVETEEMRSAIAPDPIPLTRESTADTRALNRCKAMSGSFQRGRFQVITIPQQQSAKMTSFGIEHISVFSETNHSSEEAFIKTAKSQLVEIEPATQNPKTSFSYEKLQALQETCKENKGVPKQGDNFLSFSAACETDVSSVTPEKEFEETSATGSSMQSGSELLLKEREILTAGKQPSSDSEFSASLAGSGKSVAKTGPESNQCLPHHEEQAYAQTQSSLFYSPSSPMSSDDESEIEDEDLKVELQRLREKHIQEVVNLQTQQNKELQELYERLRSIKDSKTQSTEIPLPPASPRRPRSFKSKLRSRPQSLTHVDNGIVATGKSCLINELENPLCVESNAASCQQSPASKKGMFTDDLHKLVDDWTKEAVGNSLIKPSLNQLKQSQHKLETENWNKVSENTPSTMGYTSTWISSLSQIRGAVPTSLPQGLSLPSFPGPLSSYGMPHVCQYNAVAGAGYPVQWVGISGTTQQSVVIPAQSGGPFQPGMNMQAFPTSSVQNPATIPPGPK

SEQ ID NO: 939 - protein, 370 aa, Homo sapiens
MGLWALLPGWVSATLLLALAALPAALAANSSGRWWGIVNVASSTNLLTDSKSLQLVLEPSLQLLSRKQRRLIRQNPGILHSVSGGLQSAVRECKWQFRNRRWNCPTAPGPHLFGKIVNRGCRETAFIFAITSAGVTHSVARSCSEGSIESCTCDYRRRGPGGPDWHWGGCSDNIDFGRLFGREFVDSGEKGRDLRFLMNLHNNEAGRTTVFSEMRQECKCHGMSGSCTVRTCWMRLPTLRAVGDVLRDRFDGASRVLYGNRGSNRASRAELLRLEPEDPAHKPPSPHDLVYFEKSPNFCTYSGRLGTAGTAGRACNSSSPALDGCELLCCGRGHRTRTQRVTERCNCTFHWCCHVSCRNCTHTRVLHECL

SEQ ID NO: 940 - protein, 360 aa, Homo sapiens
MNAPLGGIWLWLPLLLTWLTPEVNSSWWYMRATGGSSRVMCDNVPGLVSSQRQLCHRHPDVMRAISQGVAEWTAECQHQFRQHRWNCNTLDRDHSLFGRVLLRSSRESAFVYAISSAGVVFAITRACSQGEVKSCSCDPKKMGSAKDSKGIFDWGGCSDNIDYGIKFARAFVDAKERKGKDARALMNLHNNRAGRKAVKRFLKQECKCHGVSGSCTLRTCWLAMADFRKTGDYLWRKYNGAIQVVMNQDGTGFTVANERFKKPTKNDLVYFENSPDYCIRDREAGSLGTAGRVCNLTSRGMDSCEVMCCGRGYDTSHVTRMTKCGCKFHWCCAVRCQDCLEALDVHTCKAPKNADWTTAT

SEQ ID NO: 941 - protein, 414 aa, Homo sapiens
MAALRYAGLDDTDSEDELPPGWEERTTKDGWVYYANHTEEKTQWEHPKTGKRKRVAGDLPYGWEQETDENGQVFFVDHINKRTTYLDPRLAFTVDDNPTKPTTRQRYDGSTTAMEILQGRDFTGKVVVVTGANSGIGFETAKSFALHGAHVILACRNMARASEAVSRILEEWHKAKVEAMTLDLALLRSVQHFAEAFKAKNVPLHVLVCNAATFALPWSLTKDGLETTFQVNHLGHFYLVQLLQDVLCRSAPARVIVVSSESHRFTDINDSLGKLDFSRLSPTKNDYWAMLAYNRSKLCNILFSNELHRRLSPRGVTSNAVHPGNMMYSNIHRSWWVYTLLFTLARPFTKSMQQGAATTVYCAAVPELEGLGGMYFNNCCRCMPSPEAQSEETARTLWALSERLIQERLGSQSG

SEQ ID NO: 942 - protein, 1843 aa, Homo sapiens
MADTQTQVAPTPTMRMATAEDLPLPPPPALEDLPLPPPKESFSKFHQQRQASELRRLYRHIHPELRKNLAEAVAEDLAEVLGSEEPTEGDVQCMRWIFENWRLDAIGEHERPAAKEPVLCGDVQATSRKFEEGSFANSTDQEPTRPQPGGGDVRAARWLFETKPLDELTGQAKELEATVREPAASGDVQGTRMLFETRPLDRLGSRPSLQEQSPLELRSEIQELKGDVKKTVKLFQTEPLCAIQDAEGAIHEVKAACREEIQSNAVRSARWLFETRPLDAINQDPSQVRVIRGISLEEGARPDVSATRWIFETQPLDAIREILVDEKDFQPSPDLIPPGPDVQQQQHLFETRALDTLKGDEEAGAEAPPKEEVVPGDVRSTLWLFETKPLDAFRDKVQVGHLQRVDPQDGEGHLSSDSSSALPFSQSAPQRDELKGDVKTFKNLFETLPLDSIGQGEVLAHGSPSREEGTDSAGQAQGIGSPVYAMQDSKGRLHALTSVSREQIVGGDVQGYRWMFETQPLDQLGRSPSTIDVVRGITRQEVVAGDVGTARWLFETQPLEMIHQREQQERQKEEGKSQGDPQPEAPPKGDVQTIRWLFETCPMSELAEKQGSEVTDPTAKAEAQSCTWMFKPQPVDRPVGSREQHLQVSQVPAGERQTDRHVFETEPLQASGRPCGRRPVRYCSRVEIPSGQVSRQKEVFQALEAGKKEEQEPRVIAGSIPAGSVHKFTWLFENCPMGSLAAESIQGGNLLEEQPMSPSGNRMQESQETAAEGTLRTLHATPGILHHGGILMEARGPGELCLAKYVLSGTGQGHPYIRKEELVSGELPRIICQVLRRPDVDQQGLLVQEDPTGQLQLKPLRLPTPGSSGNIEDMDPELQQLLACGLGTSVARTGLVMQETEQGLVALTAYSLQPRLTSKASERSSVQLLASCIDKGDLSGLHSLRWEPPADPSPVPASEGAQSLHPTESIIHVPPLDPSMGMGHLRASGATPCPPQAIGKAVPLAGEAAAPAQLQNTEKQEDSHSGQKGMAVLGKSEGATTTPPGPGAPDLLAAMQSLRMATAEAQSLHQQVLNKHKQGPTPTATSNPIQDGLRKAGATQSNIRPGGGSDPRIPAAPRKVSREEQALPRGLPGGWVTIQDGIYTAHPVRTFDPPGGVQLSQREPQSRHRETALSVQAPRPLQGGPGQSTGPGREEPGGCTQMAWGPPGKAMAEVCPGGLQAAETTLKTAPLGRHILASGPQAAGASPHPHNAFVPPPPTLPAAVTGPDFPAGAHRAEDSIQQASEPLKDPLLHSHSSPAGQRTPGGSQTKTPKLDPTMPPKKKPQLPPKPAHLTQSHPPQRLPKPLPLSPSFSSEVGQREHQRGERDTAIPQPAKVPTTVDQGHIPLARCPSGHSQPSLQHGLSTTAPRPTKNQATGSNAQSSEPPKLNALNHDPTSPQWGPGPSGEQPMEGSHQGAPESPDSLQRNQKELQGLLNQVQALEKEAASSVDVQALRRLFEAVPQLGGAAPQAPAAHQKPEASVEQAFGELTRVSTEVAQLKEQTLARLLDIEEAVHKALSSMSSLQPEASARGHFQGPPKDHSAHKISVTVSSSARPSGSGQEVGGQTAVKNQAKVECHTEAQSQVKIRNHTEARGHTASTAPSTRRQETSREYLCPPRVLPSSRDSPSSPTFISIQSATRKPLETPSFKGNPDVSVKSTQLAQDIGQALLHQKGVQDKTGKKDITQCSVQPEPAPPSASPLPRGWQKSVLELQTGPGSSQHYGAMRTVTEQYEEVDQFGNTVLMSSTTVTEQAEPPRNPGSHLGLHASPLLRQFLHSPAGFSSDLTEAETVQVSCSYSQPAAQ

SEQ ID NO: 943 - protein, 940 aa, Homo sapiens
MARKRAAGGEPRGRELRSQKSKAKSKARREEEEEDAFEDEKPPKKSLLSKVSQGKRKRGCSHPGGSADGPAKKKVAKVTVKSENLKVIKDEALSDGDDLRDFPSDLKKAHHLKRGATMNEDSNEEEEESENDWEEVEELSEPVLGDVRESTAFSRSLLPVKPVEIEIETPEQAKTRERSEKIKLEFETYLRRAMKRFNKGVHEDTHKVHLLCLLANGFYRNNICSQPDLHAIGLSIIPARFTRVLPRDVDTYYLSNLVKWFIGTFTVNAELSASEQDNLQTTLERRFAIYSARDDEELVHIFLLILRALQLLTRLVLSLQPIPLKSATAKGKKPSKERLTADPGGSSETSSQVLENHTKPKTSKGTKQEETFAKGTCRPSAKGKRNKGGRKKRSKPSSSEEDEGPGDKQEKATQRRPHGRERRVASRVSYKEESGSDEAGSGSDFELSSGEASDPSDEDSEPGPPKQRKAPAPQRTKAGSKSASRTHRGSHRKDPSLPAASSSSSSSKRGKKMCSDGEKAEKRSIAGIDQWLEVFCEQEEKWVCVDCVHGVVGQPLTCYKYATKPMTYVVGIDSDGWVRDVTQRYDPVWMTVTRKCRVDAEWWAETLRPYQSPFMDREKKEDLEFQAKHMDQPLPTAIGLYKNHPLYALKRHLLKYEAIYPETAAILGYCRGEAVYSRDCVHTLHSRDTWLKKARVVRLGEVPYKMVKGFSNRARKARLAEPQLREENDLGLFGYWQTEEYQPPVAVDGKVPRNEFGNVYLFLPSMMPIGCVQLNLPNLHRVARKLDIDCVQAITGFDFHGGYSHPVTDGYIVCEEFKDVLLTAWENEQAVIERKEKEKKEKRALGNWKLLAKGLLIRERLKRRYGPKSEAAAPHTDAGGGLSSDEEEGTSSQAEAARILAASWPQNREDEEKQKLKGGPKKTKREKKAAASHLFPFEQL

SEQ ID NO: 944 - protein, 1071 aa, Homo sapiens
MPAIMTMLADHAARQLLDFSQKLDINLLDNVVNCLYHGEGAQQRMAQEVLTHLKEHPDAWTRVDTILEFSQNMNTKYYGLQILENVIKTRWKILPRNQCEGIKKYVVGLIIKTSSDPTCVEKEKVYIGKLNMILVQILKQEWPKHWPTFISDIVGASRTSESLCQNNMVILKLLSEEVFDFSSGQITQVKSKHLKDSMCNEFSQIFQLCQFVMENSQNAPLVHATLETLLRFLNWIPLGYIFETKLISTLIYKFLNVPMFRNVSLKCLTEIAGVSVSQYEEQFVTLFTLTMMQLKQMLPLNTNIRLAYSNGKDDEQNFIQNLSLFLCTFLKEHDQLIEKRLNLRETLMEALHYMLLVSEVEETEIFKICLEYWNHLAAELYRESPFSTSASPLLSGSQHFDVPPRRQLYLPMLFKVRLLMVSRMAKPEEVLVVENDQGEVVREFMKDTDSINLYKNMRETLVYLTHLDYVDTERIMTEKLHNQVNGTEWSWKNLNTLCWAIGSISGAMHEEDEKRFLVTVIKDLLGLCEQKRGKDNKAIIASNIMYIVGQYPRFLRAHWKFLKTVVNKLFEFMHETHDGVQDMACDTFIKIAQKCRRHFVQVQVGEVMPFIDEILNNINTIICDLQPQQVHTFYEAVGYMIGAQTDQTVQEHLIEKYMLLPNQVWDSIIQQATKNVDILKDPETVKQLGSILKTNVRACKAVGHPFVIQLGRIYLDMLNVYKCLSENISAAIQANGEMVTKQPLIRSMRTVKRETLKLISGWVSRSNDPQMVAENFVPPLLDAVLIDYQRNVPAAREPEVLSTMAIIVNKLGGHITAEIPQIFDAVFECTLNMINKDFEEYPEHRTNFFLLLQAVNSHCFPAFLAIPPTQFKLVLDSIIWAFKHTMRNVADTGLQILFTLLQNVAQEEAAAQSFYQTYFCDILQHIFSVVTDTSHTAGLTMHASILAYMFNLVEEGKISTSLNPGNPVNNQIFLQEYVANLLKSAFPHLQDAQVKLFVTGLFSLNQDIPAFKEHLRDFLVQIKEFAGEDTSDLFLEEREIALRQADEEKHKRQMSVPGIFNPHEIPEEMCD

SEQ ID NO: 945 - protein, 1422 aa, Homo sapiens
MSGIKRTIKETDPDYEDVSVALPNKRHKAIENSARDAAVQKIETIIKEQFALEMKNKEHEIEVIDQRLIEARRMMDKLRACIVANYYASAGLLKVSEGSKTCDTMVFNHPAIKKFLESPSRSSSPANQRAETPSANHSESDSLSQHNDFLSDKDNNSNMDIEERLSNNMEQRPSRNTGRDTSRITGSHKTEQRNADLTDETSRLFVKKTIVVGNVSKYIPPDKREENDQSTHKWMVYVRGSRREPSINHFVKKVWFFLHPSYKPNDLVEVREPPFHLTRRGWGEFPVRVQVHFKDSQNKRIDIIHNLKLDRTYTGLQTLGAETVVDVELHRHSLGEDCIYPQSSESDISDAPPSLPLTIPAPVKASSPIKQSHEPVPDTSVEKGFPASTEAERHTPFYALPSSLERTPTKMTTSQKVTFCSHGNSAFQPIASSCKIVPQSQVPNPESPGKSFQPITMSCKIVSGSPISTPSPSPLPRTPTSTPVHVKQGTAGSVINNPYVIMDKQPGQVIGATTPSTGSPTNKISTASQVSQGTGSPVPKIHGSSFVTSTVKQEDSLFASMPPLCPIGSHPKVQSPKPITGGLGAFTKVIIKQEPGEAPHVPATGAASQSPLPQYVTVKGGHMIAVSPQKQVITPGEGIAQSAKVQPSKVVGVPVGSALPSTVKQAVAISGGQILVAKASSSVSKAVGPKQVVTQGVAKAIVSGGGGTIVAQPVQTLTKAQVTAAGPQKSGSQGSVMATLQLPATNLANLANLPPGTKLYLTTNSKNPSGKGKLLLIPQGAILRATNNANLQSGSAASGGSGAGGGGGGGGGGGSGSGGGGSTGGGGGTAGGGTQSTAGPGGISQHLTYTSYILKQTPQGTFLVGQPSPQTSGKQLTTGSVVQGTLGVSTSSAQGQQTLKVISGQKTTLFTQAAHGGQASLMKISDSTLKTVPATSQLSKPGTTMLRVAGGVITTATSPAVALSANGPAQQSEGMAPVSSSTVSSVTKTSGQQQVCVSQATVGTCKAATPTVVSATSLVPTPNPISGKATVSGLLKIHSSQSSPQQAVLTIPSQLKPLSVNTSGGVQTILMPVNKVVQSFSTSKPPAILPVAAPTPVVPSSAPAAVAKVKTEPETPGPSCLSQEGQTAVKTEESSELGNYVIKIDHLETIQQLLTAVVKKIPLITAKSEDASCFSAKSVEQYYGWNIGKRRAAEWQRAMTMRKVLQEILEKNPRFHHLTPLKTKHIAHWCRCHGYTPPDPESLRNDGDSIEDVLTQIDSEPECPSSFSSADNLCRKLEDLQQFQKREPENEEEVDILSLSEPVKINIKKEQEEKQEEVKFYLPPTPGSEFIGDVTQKIGITLQPVALHRNVYASVVEDMILKATEQLVNDILRQALAVGYQTASHNRIPKEITVSNIHQAICNIPFLDFLTNKHMGILNEDQ

SEQ ID NO: 946 - protein, 1430 aa, Homo sapiens
MSRPSSVSPRQPAPGGGGGGGPSPCGPGGGGRAKGLKDIRIDEEVKIAVNIALERFRYGDQREMEFPSSLTSTERAFIHRLSQSLGLVSKSKGKGANRYLTVKKKDGSETAHAMMTCNLTHNTKHAVRSLIQRFPVTNKERTELLPKTERGNVFAVEAENREMSKTSGRLNNGIPQIPVKRGESEFDSFRQSLPVFEKQEEIVKIIKENKVVLIVGETGSGKTTQIPQFLLDDCFKNGIPCRIFCTQPRRLAAIAVAERVAAERRERIGQTIGYQIRLESRVSPKTLLTFCTNGVLLRTLMAGDSTLSTVTHVIVDEVHERDRFSDFLLTKLRDLLQKHPTLKLILSSAALDVNLFIRYFGSCPVIYIQGRPFEVKEMFLEDILRTTGYTNKEMLKYKKEKQQEEKQQTTLTEWYSAQENSFKPESQRQRTVLNVTDEYDLLDDGGDAVFSQLTEKDVNCLEPWLIKEMDACLSDIWLHKDIDAFAQVFHLILTENVSVDYRHSETSATALMVAAGRGFASQVEQLISMGANVHSKASNGWMALDWAKHFGQTEIVDLLESYSATLEFGNLDESSLVQTNGSDLSAEDRELLKAYHHSFDDEKVDLDLIMHLLYNICHSCDAGAVLIFLPGYDEIVGLRDRILFDDKRFADSTHRYQVFMLHSNMQTSDQKKVLKNPPAGVRKIILSTNIAETSITVNDVVFVIDSGKVKEKSFDALNFVTMLKMVWISKASAIQRKGRAGRCRPGICFRLFSRLRFQNMLEFQTPELLRMPLQELCLHTKLLAPVNCPIADFLMKAPEPPPALIVRNAVQMLKTIDAMDTWEDLTELGYHLADLPVEPHLGKMVLCAVVLKCLDPILTIACTLAYRDPFVLPTQASQKRAAMLCRKRFTAGAFSDHMALLRAFQAWQKARSDGWERAFCEKNFLSQATMEIIIGMRTQLLGQLRASGFVRARGGGDIRDVNTNSENWAVVKAALVAGMYPNLVHVDRENLVLTGPKEKKVRFHPASVLSQPQYKKIPPANGQAAAIKALPTDWLIYDEMTRAHRIANIRCCSAVTPVTILVFCGPARLASNALQEPSSFRVDGIPNDSSDSEMEDKTTANLAALKLDEWLHFTLEPEAASLLLQLRQKWHSLFLRRMRAPSKPWSQVDEATIRAIIAVLSTEEQSAGLQQPSGIGQRPRPMSSEELPLASSWRSNNSRKSSADTEFSDECTTAERVLMKSPSPALHPPQKYKDRGILHPKRGTEDRSDQSSLKSTDSSSYPSPCASPSPPSSGKGSKSPSPRPNMPVRYFIMKSSNLRNLEISQQKGIWSTTPSNERKLNRAFWESSIVYLVFSVQGSGHFQGFSRMSSEIGREKSQDWGSAGLGGVFKVEWIRKESLPFQFAHHLLNPWNDNKKVQISRDGQELEPLVGEQLLQLWERLPLGEKNTTD

SEQ ID NO: 947 - protein, 255 aa, Homo sapiens
MDDREDLVYQAKLAEQAERYDEMVESMKKVAGMDVELTVEERNLLSVAYKNVIGARRASWRIISSIEQKEENKGGEDKLKMIREYRQMVETELKLICCDILDVLDKHLIPAANTGESKVFYYKMKGDYHRYLAEFATGNDRKEAAENSLVAYKAASDIAMTELPPTHPIRLGLALNFSVFYYEILNSPDRACRLAKAAFDDAIAELDTLSEESYKDSTLIMQLLRDNLTLWTSDMQGDGEEQNKEALQDVEDENQ

SEQ ID NO: 948 - skipped

SEQ ID NO: 949 - protein, 673 aa, Homo sapiens
MDLTKMGMIQLQNPSHPTGLLCKANQMRLAGTLCDVVIMVDSQEFHAHRTVLACTSKMFEILFHRNSQHYTLDFLSPKTFQQILEYAYTATLQAKAEDLDDLLYAAEILEIEYLEEQCLKMLETIQASDDNDTEATMADGGAEEEEDRKARYLKNIFISKHSSEESGYASVAGQSLPGPMVDQSPSVSTSFGLSAMSPTKAAVDSLMTIGQSLLQGTLQPPAGPEEPTLAGGGRHPGVAEVKTEMMQVDEVPSQDSPGAAESSISGGMGDKVEERGKEGPGTPTRSSVITSARELHYGREESAEQVPPPAEAGQAPTGRPEHPAPPPEKHLGIYSVLPNHKADAVLSMPSSVTSGLHVQPALAVSMDFSTYGGLLPQGFIQRELFSKLGELAVGMKSESRTIGEQCSVCGVELPDNEAVEQHRKLHSGMKTYGCELCGKRFLDSLRLRMHLLAHSAGAKAFVCDQCGAQFSKEDALETHRQTHTGTDMAVFCLLCGKRFQAQSALQQHMEVHAGVRSYICSECNRTFPSHTALKRHLRSHTGDHPYECEFCGSCFRDESTLKSHKRIHTGEKPYECNGCGKKFSLKHQLETHYRVHTGEKPFECKLCHQRSRDYSAMIKHLRTHNGASPYQCTICTEYCPSLSSMQKHMKGHKPEEIPPDWRIEKTYLYLCYV

SEQ ID NO: 950 - protein, 741 aa, Homo sapiens
MLERKKPKTAENQKASEENEITQPGGSSAKPGLPCLNFEAVLSPDPALIHSTHSLTNSHAHTGSSDCDISCKGMTERIHSINLHNFSNSVLETLNEQRNRGHFCDVTVRIHGSMLRAHRCVLAAGSPFFQDKLLLGYSDIEIPSVVSVQSVQKLIDFMYSGVLRVSQSEALQILTAASILQIKTVIDECTRIVSQNVGDVFPGIQDSGQDTPRGTPESGTSGQSSDTESGYLQSHPQHSVDRIYSALYACSMQNGSGERSFYSGAVVSHHETALGLPRDHHMEDPSWITRIHERSQQMERYLSTTPETTHCRKQPRPVRIQTLVGNIHIKQEMEDDYDYYGQQRVQILERNESEECTEDTDQAEGTESEPKGESFDSGVSSSIGTEPDSVEQQFGPGAARDSQAEPTQPEQAAEAPAEGGPQTNQLETGASSPERSNEVEMDSTVITVSNSSDKSVLQQPSVNTSIGQPLPSTQLYLRQTETLTSNLRMPLTLTSNTQVIGTAGNTYLPALFTTQPAGSGPKPFLFSLPQPLAGQQTQFVTVSQPGLSTFTAQLPAPQPLASSAGHSTASGQGEKKPYECTLCNKTFTAKQNYVKHMFVHTGEKPHQCSICWRSFSLKDYLIKHMVTHTGVRAYQCSICNKRFTQKSSLNVHMRLHRGEKSYECYICKKKFSHKTLLERHVALHSASNGTPPAGTPPGARAGPPGVVACTEGTTYVCSVCPAKFDQIEQFNDHMRMHVSDG

SEQ ID NO: 951 - protein, 1303 aa, Homo sapiens
MEAAPGTPPPPPSESPPPPSPPPPSTPSPPPCSPDARPATPHLLHHRLPLPDDREDGELEEGELEDDGAEETQDTSGGPERSRKEKGEKHHSDSDEEKSHRRLKRKRKKEREKEKRRSKKRRKSKHKRHASSSDDFSDFSDDSDFSPSEKGHRKYREYSPPYAPSHQQYPPSHATPLPKKAYSKMDSKSYGMYEDYENEQYGEYEGDEEEDMGKEDYDDFTKELNQYRRAKEGSSRGRGSRGRGRGYRGRGSRGGSRGRGMGRGSRGRGRGSMGGDHPEDEEDFYEEEMDYGESEEPMGDDDYDEYSKELNQYRRSKDSRGRGLSRGRGRGSRGRGKGMGRGRGRGGSRGGMNKGGMNDDEDFYDEDMGDGGGGSYRSRDHDKPHQQSDKKGKVICKYFVEGRCTWGDHCNFSHDIELPKKRELCKFYITGFCARAENCPYMHGDFPCKLYHTTGNCINGDDCMFSHDPLTEETRELLDKMLADDAEAGAEDEKEVEELKKQGINPLPKPPPGVGLLPTPPRPPGPQAPTSPNGRPMQGGPPPPPPPPPPPPGPPQMPMPVHEPLSPQQLQQQDMYNKKIPSLFEIVVRPTGQLAEKLGVRFPGPGGPPGPMGPGPNMGPPGPMGGPMHPDMHPDMHPDMHPDMHADMHADMPMGPGMNPGPPMGPGGPPMMPYGPGDSPHSGMMPPIPPAQNFYENFYQQQEGMEMEPGLLGDAEDYGHYEELPGEPGEHLFPEHPLEPDSFSEGGPPGRPKPGAGVPDFLPSAQRALYLRIQQKQQEEEERARRLAESSKQDRENEEGDTGNWYSSDEDEGGSSVTSILKTLRQQTSSRPPASVGELSSSGLGDPRLQKGHPTGSRLADPRLSRDPRLTRHVEASGGSGPGDSGPSDPRLARALPTSKPEGSLHSSPVGPSSSKGSGPPPTEEEEGERALREKAVNIPLDPLPGHPLRDPRSQLQQFSHIKKDVTLSKPSFARTVLWNPEDLIPLPIPKQDAVPPVPAALQSMPTLDPRLHRAATAGPPNARQRPGASTDSSTQGANLPDFELLSRILKTVNATGSSAAPGSSDKPSDPRVRKAPTDPRLQKPTDSTASSRAAKPGPAEAPSPTASPSGDASPPATAPYDPRVLAAGGLGQGGGGGQSSVLSGISLYDPRTPNAGGKATEPAADTGAQPKGAEGNGKSSASKAKEPPFVRKSALEQPETGKAGADGGTPTDRYNSYNRPRPKAAAAPAATTATPPPEGAPPQPGVHNLPVPTLFGTVKQTPKTGSGSPFAGNSPAREGEQDAASLKDVFKGFDPTASPFCQ

SEQ ID NO: 952 - protein, 602 aa, Homo sapiens
MARLTKRRQADTKAIQHLWAAIEIIRNQKQIANIDRITKYMSRVHGMHPKETTRQLSLAVKDGLIVETLTVGCKGSKAGIEQEGYWLPGDEIDWETENHDWYCFECHLPGEVLICDLCFRVYHSKCLSDEFRLRDSSSPWQCPVCRSIKKKNTNKQEMGTYLRFIVSRMKERAIDLNKKGKDNKHPMYRRLVHSAVDVPTIQEKVNEGKYRSYEEFKADAQLLLHNTVIFYGADSEQADIARMLYKDTCHELDELQLCKNCFYLSNARPDNWFCYPCIPNHELVWAKMKGFGFWPAKVMQKEDNQVDVRFFGHHHQRAWIPSENIQDITVNIHRLHVKRSMGWKKACDELELHQRFLREGRFWKSKNEDRGEEEAESSISSTSNEQLKVTQEPRAKKGRRNQSVEPKKEEPEPETEAVSSSQEIPTMPQPIEKVSVSTQTKKLSASSPRMLHRSTQTTNDGVCQSMCHDKYTKIFNDFKDRMKSDHKRETERVVREALEKLRSEMEEEKRQAVNKAVANMQGEMDRKCKQVKEKCKEEFVEEIKKLATQHKQLISQTKKKQWCYNCEEEAMYHCCWNTSYCSIKCQQEHWHAEHKRTCRRKR

SEQ ID NO: 953 - protein, 549 aa, Homo sapiens
MPVDLGQALGLLPSLAKAEDSQFSESDAALQEELSSPETARQLFRQFRYQVMSGPHETLKQLRKLCFQWLQPEVHTKEQILEILMLEQFLTILPGEIQMWVRKQCPGSGEEAVTLVESLKGDPQRLWQWISIQVLGQDILSEKMESPSCQVGEVEPHLEVVPQELGLENSSSGPGELLSHIVKEESDTEAELALAASQPARLEERLIRDQDLGASLLPAAPQEQWRQLDSTQKEQYWDLMLETYGKMVSGAGISHPKSDLTNSIEFGEELAGIYLHVNEKIPRPTCIGDRQENDKENLNLENHRDQELLHASCQASGEVPSQASLRGFFTEDEPGCFGEGENLPEALQNIQDEGTGEQLSPQERISEKQLGQHLPNPHSGEMSTMWLEEKRETSQKGQPRAPMAQKLPTCRECGKTFYRNSQLIFHQRTHTGETYFQCTICKKAFLRSSDFVKHQRTHTGEKPCKCDYCGKGFSDFSGLRHHEKIHTGEKPYKCPICEKSFIQRSNFNRHQRVHTGEKPYKCSHCGKSFSWSSSLDKHQRSHLGKKPFQ

SEQ ID NO: 954 - protein, 2723 aa, Homo sapiens
MADEEAEQERLSCGEGGCVAELQRLGERLQELELQLRESRVPAVEAATDYCQQLCQTLLEYAEKWKTSEDPLPLLEVYTVAIQSYVKARPYLTSECENVALVLERLALSCVELLLCLPVELSDKQWEQFQTLVQVAHEKLMENGSCELHFLATLAQETGVWKNPVLCTILSQEPLDKDKVNEFLAFEGPILLDMRIKHLIKTNQLSQATALAKLCSDHPEIGIKGSFKQTYLVCLCTSSPNGKLIEEISEVDCKDALEMICNLESEGDEKSALVLCTAFLSRQLQQGDMYCAWELTLFWSKLQQRVEPSIQVYLERCRQLSLLTKTVYHIFFLIKVINSETEGAGLATCIELCVKALRLESTENTEVKISICKTISCLLPDDLEVKRACQLSEFLIEPTVDAYYAVEMLYNQPDQKYDEENLPIPNSLRCELLLVLKTQWPFDPEFWDWKTLKRQCLALMGEEASIVSSIDELNDSEVYEKVVDYQEESKETSMNGLSGGVGANSGLLKDIGDEKQKKREIKQLRERGFISARFRNWQAYMQYCVLCDKEFLGHRIVRHAQKHYKDGIYSCPICAKNFNSKETFVPHVTLHVKQSSKERLAAMKPLRRLGRPPKITTTNENQKTNTVAKQEQRPIKKNSLYSTDFIVFNDNDGSDDENDDKDKSYEPEVIPVQKPVPVNEFNCPVTFCKKGFKYFKNLIAHVKGHKDNEDAKRFLEMQSKKVICQYCRRHFVSVTHLNDHLQMHCGSKPYICIQMKCKAGFNSYAELLTHRKEHQVFRAKCMFPKCGRIFSEAYLLYDHEAQHYNTYTCKFTGCGKVYRSQGELEKHLDDHSTPPEKVLPPEAQLNSSGDSIQPSEVNQNTAENIEKERSMLPSENNIENSLLADRSDAWDKSKAESAVTKQDQISASELRQANGPLSNGLENPATTPLLQSSEVAVSIKVSLNQGIEDNFGKQENSTVEGSGEALVTDLHTPVEDTCNDLCHPGFQERKEQDCFNDAHVTQNSLVNSETLKIGDLTPQNLERQVNNLMTFSVQNQAAFQNNLPTSKFECGDNVKTSSNLYNLPLKTLESIAFVPPQSDLSNSLGTPSVPPKAPVQKFSCQVEGCTRTYNSSQSIGKHMKTAHPDQYAAFKMQRKSKKGQKANNLNTPNNGKFVYFLPSPVNSSNPFFTSQTKANGNPACSAQLQHVSPPIFPAHLASVSTPLLSSMESVINPNITSQDKNEQGGMLCSQMENLPSTALPAQMEDLTKTVLPLNIDSGSDPFLPLPAESSSMSLFPSPADSGTNSVFSQLENNTNHYSSQIEGNTNSSFLKGGNGENAVFPSQVNVANNFSSTNAQQSAPEKVKKDRGRGPNGKERKPKHNKRAKWPAIIRDGKFICSRCYRAFTNPRSLGGHLSKRSYCKPLDGAEIAQELLQSNGQPSLLASMILSTNAVNLQQPQQSTFNPEACFKDPSFLQLLAENRSPAFLPNTFPRSGVTNFNTSVSQEGSEIIKQALETAGIPSTFEGAEMLSHVSTGCVSDASQVNATVMPNPTVPPLLHTVCHPNTLLTNQNRTSNSKTSSIEECSSLPVFPTNDLLLKTVENGLCSSSFPNSGGPSQNFTSNSSRVSVISGPQNTRSSHLNKKGNSASKRRKKVAPPLIAPNASQNLVTSDLTTMGLIAKSVEIPTTNLHSNVIPTCEPQSLVENLTQKLNNVNNQLFMTDVKENFKTSLESHTVLAPLTLKTENGDSQMMALNSCTTSINSDLQISEDNVIQNFEKTLEIIKTAMNSQILEVKSGSQGAGETSQNAQINYNIQLPSVNTVQNNKLPDSSPFSSFISVMPTKSNIPQSEVSHKEDQIQEILEGLQKLKLENDLSTPASQCVLINTSVTLTPTPVKSTADITVIQPVSEMINIQFNDKVNKPFVCQNQGCNYSAMTKDALFKHYGKIHQYTPEMILEIKKNQLKFAPFKCVVPTCTKTFTRNSNLRAHCQLVHHFTTEEMVKLKIKRPYGRKSQSENVPASRSTQVKKQLAMTEENKKESQPALELRAETQNTHSNVAVIPEKQLVEKKSPDKTESSLQVITVTSEQCNTNALTNTQTKGRKIRRHKKEKEEKKRKKPVSQSLEFPTRYSPYRPYRCVHQGCFAAFTIQQNLILHYQAVHKSDLPAFSAEVEEESEAGKESEETETKQTLKEFRCQVSDCSRIFQAITGLIQHYMKLHEMTPEEIESMTASVDVGKFPCDQLECKSSFTTYLNYVVHLEADHGIGLRASKTEEDGVYKCDCEGCDRIYATRSNLLRHIFNKHNDKHKAHLIRPRRLTPGQENMSSKANQEKSKSKHRGTKHSRCGKEGIKMPKTKRKKKNNLENKNAKIVQIEENKPYSLKRGKHVYSIKARNDALSECTSRFVTQYPCMIKGCTSVVTSESNIIRHYKCHKLSKAFTSQHRNLLIVFKRCCNSQVKETSEQEGAKNDVKDSDTCVSESNDNSRTTATVSQKEVEKNEKDEMDELTELFITKLINEDSTSVETQANTSSNVSNDFQEDNLCQSERQKASNLKRVNKEKNVSQNKKRKVEKAEPASAAELSSVRKEEETAVAIQTIEEHPASFDWSSFKPMGFEVSFLKFLEESAVKQKKNTDKDHPNTGNKKGSHSNSRKNIDKTAVTSGNHVCPCKESETFVQFANPSQLQCSDNVKIVLDKNLKDCTELVLKQLQEMKPTVSLKKLEVHSNDPDMSVMKDISIGKATGRGQY

SEQ ID NO: 955 - protein, 471 aa, Homo sapiens
MNMANFLRGFEEKGIKNDRPEDQLSKEKKKILFSFCEVCNIQLNSAAQAQVHSNGKSHRKRVKQLSDGQPPPPAQASPSSNSSTGSTCHTTTLPALVRTPTLMMQPSLDIKPFMSFPVDSSSAVGLFPNFNTMDPVQKAVINHTFGVSIPPKKKQVISCNVCQLRFNSDSQAEAHYKGSKHAKKVKALDATKNKPKMVPSKDSAKANPSCSITPITGNNSDKSEDKGKLKASSSSQPSSSESGSFLLKSGTTPLPPGAATSPSKSTNGAPGTVVESEEEKAKKLLYCSLCKVAVNSLSQLEAHNTGSKHKTMVEARNGAGPIKSYPRPGSRLKMQNGSKGSGLQNKTFHCEICDVHVNSEIQLKQHISSRRHKDRVAGKPLKPKYSPYNKLQRSPSILAAKLAFQKDMMKPLAPAFLSSPLAAAAAVSSALSLPPRPSASLFQAPAIPPALLRPGHGPIRATPASILFAPY

SEQ ID NO: 956 - protein, 2248 aa, Homo sapiens
MMDSENKPENDEDEKINKEAQDLTKLSSHNEDGGPVSDVIASFPENSMGKRGFSESSNSDSVVIGEDRNKHASKRRKLDEAEPLKSGKQGICRLETSESSVTEGGIALDETGKETFLSDCTVGGTCLPNALSPSCNFSTIDVVSLKTDTEKTSAQEMVSLDLERESPFPPKEISVSCTIGNVDTVLKCSICGHLFSSCSDLEKHAESHMQQPKEHTCCHCSHKAESSSALHMHIKQAHGPQKVFSCDLCGFQCSEENLLNAHYLGKTHLRRQNLAARGGFVQILTKQPFPKKSRTMATKNVHSKPRTSKSIAKNSDSKGLRNVGSTFKDFRGSISKQSGSSSELLVEMMPSRNTLSQEVEIVEEHVTSLGLAQNPENQSRKLDTLVTSEGLLEKLESTKNTLQAAHGNSVTSRPRPERNILVLGNSFRRRSSTFTLKGQAKKRFNLLGIKRGTSETQRMYMKHLRTQMKTHDAESVLKHLEACSSVQRVCVTTSETQEAEQGQGSARPPDSGLHSLTVKPASGSQTLCACTDCGQVATNRTDLEIHVKRCHAREMKFYCRTCDFSSMSRRDLDEHLHSNQHQQTASVLSCQCCSFISLDEINLRDHMKEKHNMHFLCTPCNLFFLSEKDVEEHKATEKHINSLVQPKTLQSSNSDLVLQTLPLSTLESENAKESMDDSGKASQEEPLKSRVSHGNEVRHSSKPQFQCKKCFYKTRSSTVLTRHIKLRHGQDYHFLCKACNLYSLSKEGMEKHIKRSKHLENAKKNNIGLSFEECIERVCIGANDKKEEFDVSGNGRIEGHIGVQLQEHSYLEKGMLASEELSQSGGSTKDDELASTTTPKRGRPKGNISRTCSHCGLLASSITNLTVHIRRKHSHQYSYLCKVCKYYTVTKGDMERHCATKKHKGRVEIEASGKHSSDIIVGPEGGSLEAGKKNAGSAVTMSDEHANKPAESPTSVLEKPDRGNSIEAEVENVFHSLDGEVNSHLLDKKEQISSEPEDFAQPGDVYSQRDVTGTGENKCLHCEFSAHSSASLELHVKRKHTKEFEFYCMACDYYAVTRREMTRHAATEKHKMKRQSYLNSANVEAGSADMSKNIIMPEEEHQQNSEEFQIISGQPSDTLKSRNAADCSILNENTNLDMSKVLCAADSVEVETEEESNFNEDHSFCETFQQAPVKDKVRKPEEMMSLTMSSNYGSPSRFQNENSGSSALNCETAKKNHEISNDAGELRVHCEGEGGNAGDGGGVVPHRHLCPVTLDGERSAESPVLVVTRITREQGNLESGGQNRVARGHGLEDLKGVQEDPVLGNKEILMNSQHETEFILEEDGPASDSTVESSDVYETIISIDDKGQAMYSFGRFDSSIIRIKNPEDGELIDQSEEGLIATGVRISELPLKDCAQGVKKKKSEGSSIGESTRIRCDDCGFLADGLSGLNVHIAMKHPTKEKHFHCLLCGKSFYTESNLHQHLASAGHMRNEQASVEELPEGGATFKCVKCTEPFDSEQNLFLHIKGQHEELLREVNKYIVEDTEQINREREENQGNVCKYCGKMCRSSNSMAFLAHIRTHTGSKPFKCKICHFATAQLGDARNHVKRHLGMREYKCHVCGVAFVMKKHLNTHLLGKHGVGTPKERKFTCHLCDRSFTEKWALNNHMKLHTGEKPFKCTWPTCHYSFLTASAMKDHYRTHTGEKSFLCDLCGFAGGTRHALTKHRRQHTGEKPFKCDECNFASTTQSHLTRHKRVHTGEKPYRCPWCDYRSNCAENIRKHILHTGKHEGVKMYNCPKCDYGTNVPVEFRNHLKEQHPDIENPDLAYLHAGIVSKSYECRLKGQGATFVETDSPFTAAALAEEPLVKEKPLRSSRRPAPPPEQVQQVIIFQGYDGEFALDPSVEETAAATLQTLAMAGQVARVVHITEDGQVIATSQSGAHVGSVVPGPILPEQLADGATQVVVVGGSMEGHGMDESLSPGGAVIQQVTKQEILNLSEAGVAPPEASSALDALLCAVTELGEVEGRAGLEEQGRPGAKDVLIQLPGQEVSHVAADPEAPEIQMFPQAQESPAAVEVLTQVVHPSAAMASQERAQVAFKKMVQGVLQFAVCDTAAAGQLVKDGVTQVVVSEEGAVHMVAGEGAQIIMQEAQGEHMDLVESDGEISQIIVTEELVQAMVQESSGGFSEGTTHYILTELPPGVQDEPGLYSHTVLETADSQELLQAGATLGTEAGAPSRAEQLASVVIYTQEGSSAAAAIQSQRESSELQEA

SEQ ID NO: 957 - protein, 2506 aa, Homo sapiens
MEVLQCDGCDFRAPSYEDLKAHIQDVHTAFLQPTDVAEDNVNELRCGSVNASNQTEVEFSSIKDEFAIAEDLSGQNATSLGTGGYYGHSPGYYGQHIAANPKPTNKFFQCKFCVRYFRSKNLLIEHTRKVHGAQAEGSSSGPPVPGSLNYNIMMHEGFGKVFSCQFCTYKSPRRARIIKHQKMYHKNNLKETTAPPPAPAPMPDPVVPPVSLQDPCKELPAEVVERSILESMVKPLTKSRGNFCCEWCSYQTPRRERWCDHMMKKHRSMVKILSSLRQQQEGTNLPDVPNKSAPSPTSNSTYLTMNAASREIPNTTVSNFRGSMGNSIMRPNSSASKFSPMSYPQMKPKSPHNSGLVNLTERSRYGMTDMTNSSADLETNSMLNDSSSDEELNEIDSENGLSAMDHQTSGLSAEQLMGSDGNKLLETKGIPFRRFMNRFQCPFCPFLTMHRRSISRHIENIHLSGKTAVYKCDECPFTCKSSLKLGAHKQCHTGTTSDWDAVNSQSESISSSLNEGVVSYESSSINGRKSGVMLDPLQQQQPPQPPPPPPPPPPSQPQPLQQPQPPQLQPPHQVPPQPQTQPPPTQQPQPPTQAAPLHPYKCTMCNYSTTTLKGLRVHQQHKHSFCDNLPKFEGQPSSLPLENETDSHPSSSNTVKKSQTSILGLSSKNNFVAKASRKLANDFPLDLSPVKKRTRIDEIASNLQSKINQTKQQEDAVINVEDDEEEEEDNEVEIEVELDREEEPTEPIIEVPTSFSAQQIWVRDTSEPQKEPNFRNITHDYNATNGAEIELTLSEDEEDYYGSSTNLKDHQVSNTALLNTQTPIYGTEHNSENTDFGDSGRLYYCKHCDFNNKSARSVSTHYQRMHPYIKFSFRYILDPNDHSAVYRCLECYIDYTNFEDLQQHYGEHHPEAMNVLNFDHSDLIYRCRFCSYTSPNVRSLMPHYQRMHPTVKINNAMIFSSYVVEQQEGLNTESQTLREILNSAPKNMATSTPVARGGGLPATFNKNTPKTFTPECENQKDPLVNTVVVYDCDVCSFASPNMHSVLVHYQKKHPEEKASYFRIQKTMRMVSVDRGSALSQLSFEVGAPMSPKMSNMGSPPPPQPPPPDLSTELYYCKHCSYSNRSVVGVLVHYQKRHPEIKVTAKYIRQAPPTAAMMRGVEGPQGSPRPPAPIQQLNRSSSERDGPPVENEMFFCQHCDYGNRTVKGVLIHYQKKHRDFKANADVIRQHTATIRSLCDRNQKKPASCVLVSPSNLERDKTKLRALKCRQCSYTSPYFYALRKHIKKDHPALKATVTSIMRWAFLDGLIEAGYHCEWCIYSHTEPNGLLLHYQRRHPEHYVDYTYMATKLWAGPDPSPPSLTMPAEAKTYRCRDCVFEAVSIWDITNHYQAFHPWAMNGDESVLLDIIKEKDAVEKPILSSEELAGPVNCENSIPTPFPEQEAECPEDARLSPEKSLQLASANPAISSTPYQCTVCQSEYNNLHGLLTHYGKKHPGMKVKAADFAQDIDINPGAVYKCRHCPYINTRIHGVLTHYQKRHPSIKVTAEDFVHDVEQSADISQNDVEETSRIFKQGYGAYRCKLCPYTHGTLEKLKIHYEKYHNQPEFDVFSQSPPKLPVPLEPEMTTEVSPSQVSITEEEVGEEPVSTSHFSTSHLVSHTVFRCQLCKYFCSTRKGIARHYRIKHNNVRAQPEGKNNLFKCALCAYTNPIRKGLAAHYQKRHDIDAYYTHCLAASRTISDKPNKVIIPSPPKDDSPQLSEELRRAVEKKKCSLCSFQSFSKKGIVSHYMKRHPGVFPKKQHASKLGGYFTAVYADEHEKPTLMEEEERGNFEKAEVEGEAQEIEWLPFRCIKCFKLSFSTAELLCMHYTDHHSRDLKRDFIILGNGPRLQNSTYQCKHCDSKLQSTAELTSHLNIHNEEFQKRAKRQERRKQLLSKQKYADGAFADFKQERPFGHLEEVPKIKERKVVGYKCKFCVEVHPTLRAICNHLRKHVQYGNVPAVSAAVKGLRSHERSHLALAMFTREDKYSCQYCSFVSAFRHNLDRHMQTHHGHHKPFRCKLCSFKSSYNSRLKTHILKAHAGEHAYKCSWCSFSTMTISQLKEHSLKVHGKALTLPRPRIVSLLSSHSHHSSQKATPAEEVEDSNDSSYSEPPDVQQQLNHYQSAALARNNSRVSPVPLSGAAAGTEQKTEAVLHCEFCEFSSGYIQSIRRHYRDKHGGKKLFKCKDCSFYTGFKSAFTMHVEAGHSAVPEEGPKDLRCPLCLYHTKYKRNMIDHIVLHREERVVPIEVCRSKLSKYLQGVVFRCDKCTFTCSSDESLQQHIEKHNELKPYKCQLCYYETKHTEELDSHLRDEHKVSRNFELVGRVNLDQLEQMKEKMESSSSDDEDKEEEMNSKAEDRELMRFSDHGAALNTEKRFPCEFCGRAFSQGSEWERHVLRHGMALNDTKQVSREEIHPKEIMENSVKMPSIEEKEDDEAIGIDFSLKNETVAICVVTADKSLLENAEAKKE

SEQ ID NO: 958 - protein, 492 aa, Homo sapiens
MAMALPMPGPQEAVVFEDVAVYFTRIEWSCLAPDQQALYRDVMLENYGNLASLGFLVAKPALISLLEQGEEPGALILQVAEQSVAKASLCTDSRMEAGIMESPLQRKLSRQAGLPGTVWGCLPWGHPVGGHPAPPHPHGGPEDGSDKPTHPRAREHSASPRVLQEDLGRPVGSSAPRYRCVCGKAFRYNSLLLRHQIIHTGAKPFQCTECGKAFKQSSILLRHQLIHTEEKPFQCGECGKAFRQSTQLAAHHRVHTRERPYACGECGKAFSRSSRLLQHQKFHTGEKPFACTECGKAFCRRFTLNEHGRIHSGERPYRCLRCGQRFIRGSSLLKHHRLHAQEGAQDGGVGQGALLGAAQRPQAGDPPHECPVCGRPFRHNSLLLLHLRLHTGEKPFECAECGKAFGRKSNLTLHQKIHTKEKPFACTECGKAFRRSYTLNEHYRLHSGERPYRCRACGRACSRLSTLIQHQKVHGREPGEDTEGRRAPCWAS

SEQ ID NO: 959 - protein, 602 aa, Homo sapiens
MRITAAILTARSRWRLRNSISAFLFTVTFAWCPPGLSNLTILSCPDHLSQDVFCLHESKFEEERMVAGWLTNYSQDSVTFEDVAVDFTQEEWTLLDQTQRNLYRDVMLENYKNLVAVDWESHINTKWSAPQQNFLQGKTSSVVEMERNHFGEELFDFNQCEKALSEHSCLKTHRRTYFRKKTCECNQCEKAFRKPSIFTLHKKTDIGEELPNCNQCETAFSQHLHLVCKKTSQNLHLVCKKTHTQEKPYKCSDCEKGLPSSSHLRECVRIYGGERPYTHKEYVETFSHSTALFVHMQTQDGEKFYECKACGKPFTESSYLTQHLRTHSRVLPIEHKKFGKAFAFSPDLAKHIRLRTRGKHYVCNECGKEFTCFSKLNIHIRVHTGEKPYECNKCGKAFTDSSGLIKHRRTHTGEKPYECKECGKAFANSSHLTVHMRTHTGEKPYQCKECGKAFINSSSFKSHMQTHPGVKPYDCQQCGKAFIRSSFLIRHLRSHSAERPFECEECGKAFRYSSHLSQHKRIHTGERPYKCQKCGQAFSISSGLTVHMRTHTGERPFECQECGKAFTRSTYLIRHLRSHSVEKPYKECGQTFSNSSCLTECV

SEQ ID NO: 960 - protein, 430 aa, Homo sapiens
MEEEEMNDGSQMVRSQESLTFQDVAVDFTREEWDQLYPAQKNLYRDVMLENYRNLVALGYQLCKPEVIAQLELEEEWVIERDSLLDTHPDGENRPEIKKSTTSQNISDENQTHEMIMERLAGDSFWYSILGGLWDFDYHPEFNQENHKRYLGQVTLTHKKITQERSLECNKFAENCNLNSNLMQQRIPSIKIPLNSDTQGNSIKHNSDLIYYQGNYVRETPYEYSECGKIFNQHILLTDHIHTAEKPSECGKAFSHTSSLSQPQMLLTGEKPYKCDECGKRFSQRIHLIQHQRIHTGEKPFICNGCGKAFRQHSSFTQHLRIHTGEKPYKCNQCGKAFSRITSLTEHHRLHTGEKPYECGFCGKAFSQRTHLNQHERTHTGEKPYKCNECGKAFSQSAHLNQHRKIHTREKLCEYKCEQTVRHSPSFSST

SEQ ID NO: 961 - protein, 483 aa, Homo sapiens
MWLGTSGKSGLPGHCLENPLQECHPAQLEEWALKGISRPSVISQPEQKEEPWVLPLQNFEARKIPRESHTDCEHQVAKLNQDNSETAEQCGTSSERTNKDLSHTLSWGGNWEQGLELEGQHGTLPGEGQLESFSQERDLNKLLDGYVGEKPMCAECGKSFNQSSYLIRHLRTHTGERPYTCIECGKGFKQSSDLVTHRRTHTGEKPYQCKGCEKKFSDSSTLIKHQRTHTGERPYECPECGKTFGRKPHLIMHQRTHTGEKPYACLECHKSFSRSSNFITHQRTHTGVKPYRCNDCGESFSQSSDLIKHQRTHTGERPFKCPECGKGFRDSSHFVAHMSTHSGERPFSCPDCHKSFSQSSHLVTHQRTHTGERPFKCENCGKGFADSSALIKHQRIHTGERPYKCGECGKSFNQSSHFITHQRIHLGDRPYRCPECGKTFNQRSHFLTHQRTHTGEKPFHCSKCNKSFRQKAHLLCHQNTHLI

SEQ ID NO: 962 - protein, 575 aa, Homo sapiens
MDPEDEGVAGVMSVGPPAARLQEPVTFRDVAVDFTQEEWGQLDPTQRILYRDVMLETFGHLLSIGPELPKPEVISQLEQGTELWVAERGTTQGCHPAWEPRSESQASRKEEGLPEEEPSHVTGREGFPTDAPYPTTLGKDRECQSQSLALKEQNNLKQLEFGLKEAPVQDQGYKTLRLRENCVLSSSPNPFPEISRGEYLYTYDSQITDSEHNSSLVSQQTGSPGKQPGENSDCHRDSSQAIPITELTKSQVQDKPYKCTDCGKSFNHNAHLTVHKRIHTGERPYMCKECGKAFSQNSSLVQHERIHTGDKPYKCAECGKSFCHSTHLTVHRRIHTGEKPYECQDCGRAFNQNSSLGRHKRTHTGEKPYTCSVCGKSFSRTTCLFLHLRTHTEERPYECNHCGKGFRHSSSLAQHQRKHAGEKPFECRQRLIFEQTPALTKHEWTEALGCDPPLSQDERTHRSDRPFKCNQCGKCFIQSSHLIRHQITHTREEQPHGRSRRREQSSSRNSHLVQHQHPNSRKSSAGGAKAGQPESRALALFDIQKIMQEKNPVHVIGVEEPSVGASMLFDIREST

SEQ ID NO: 963 - protein, 1209 aa, Homo sapiens
MECYYIVISSTHLSNGHFRNIKGVFRGPLSKNGNKTLDYAEKENTIAKALEDLKANFYCELCDKQYYKHQEFDNHINSYDHAHKQRLKELKQREFARNVASKSRKDERKQEKALQRLHKLAELRKETVCAPGSGPMFKSTTVTVRENCNEISQRVVVDSVNNQQDFKYTLIHSEENTKDATTVAEDPESANNYTAKNNQVGDQAQGIHRHKIGFSFAFPKKASVKLESSAAAFSEYSDDASVGKGFSRKSRFVPSACHLQQSSPTDVLLSSEEKTNSFHPPEAMCRDKETVQTQEIKEVSSEKDALLLPSFCKFQLQLSSDADNCQNSVPLADQIPLESVVINEDIPVSGNSFELLGNKSTVLDMSNDCISVQATTEENVKHNEASTTEVENKNGPETLAPSNTEEVNITIHKKTNFCKRQCEPFVPVLNKHRSTVLQWPSEMLVYTTTKPSISYSCNPLCFDFKSTKVNNNLDKNKPDLKDLCSQQKQEDICMGPLSDYKDVSTEGLTDYEIGSSKNKCSQVTPLLADDILSSSCDSGKNENTGQRYKNISCKIRETEKYNFTKSQIKQDTLDEKYNKIRLKETHEYWFHKSRRKKKRKKLCQHHHMEKTKESETRCKMEAENSYTENAGKYLLEPISEKQYLAAEQLLDSHQLLDKRPKSESISLSDNEEMCKTWNTEYNTYDTISSKNHCKKNTILLNGQSNATMIHSGKHNLTYSRTYCCWKTKMSSCSQDHRSLVLQNDMKHMSQNQAVKRGYNSVMNESERFYRKRRQHSHSYSSDESLNRQNHLPEEFLRPPSTSVAPCKPKKKRRRKRGRFHPGFETLELKENTDYPVKDNSSLNPLDRLISEDKKEKMKPQEVAKIERNSEQTNQLRNKLSFHPNNLLPSETNGETEHLEMETTSGELSDVSNDPTTSVCVASAPTKEAIDNTLLEHKERSENINLNEKQIPFQVPNIERNFRQSQPKSYLCHYELAEALPQGKMNETPTEWLRYNSGILNTQPPLPFKEAHVSGHTFVTAEQILAPLALPEQALLIPLENHDKFKNVPCEVYQHILQPNMLANKVKFTFPPAALPPPSTPLQPLPLQQSLCSTSVTTIHHTVLQQHAAAAAAAAAAAAAGTFKVLQPHQQFLSQIPALTRTSLPQLSVGPVGPRLCPGNQPTFVAPPQMPIIPASVLHPSHLAFPSLPHALFPSLLSPHPTVIPLQPLF

SEQ ID NO: 964 - protein, 1077 aa, Homo sapiens
MPRRKQEQPKRLPSHVSRQEEAEGELSEGEHWYGNSSETPSEASYGEVQENYKLSLEDRIQEQSTSPDTSLGSTTPSSHTLELVALDSEVLRDSLQCQDHLSPGVSSLCDDDPGSNKPLSSNLRRLLEAGSLKLDAAATANGRVESPVNVGSNLSFSPPSHHAQQLSVLARKLAEKQEQNDQYTPSNRFIWNQGKWLPNSTTTCSLSPDSAILKLKAAANAVLQDKSLTRTEETMRFESFSSPFSSQSASSTLAALSKKVSERSLTPGQEHPPPASSFLSLASMTSSAALLKEVAARAAGSLLAEKSSLLPEDPLPPPPSEKKPEKVTPPPPPPPPPPPPPPPQSLELLLLPVPKGRVSKPSNSASEEESGKPFQCPICGLVIKRKSYWKRHMVIHTGLKSHQCPLCPFRCARKDNLKSHMKVHQHQDRGETFQCQLCPFTSSRHFSLKLHMRCHQHFLRTEAKVKEEIPDPDVKGSPHLSDSACLGQQREGGGTELVGTMMTSNTPERTSQGGAGVSPLLVKEEPKEDNGLPTSFTLNAADRPANHTKLKDPSEYVANSASALFSQDISVKMASDFLMKLSAANQKEPMNLNFKVKEEPKEGESLSTTLPRSSYVFSPESEVSAPGVSEDALKPQEGKGSVLRRDVSVKAASELLMKLSAESYKETQMVKIKEEPMEVDIQDSHVSISPSRNVGYSTLIGREKTEPLQKMPEGRVPPERNLFSQDISVKMASELLFQLSEKVSKEHNHTKENTIRTTTSPFFSEDTFRQSPFTSNSKELLPSDSVLHGRISAPETEKIVLEAGNGLPSWKFNDQLFPCDVCGKVFGRQQTLSRHLSLHTEERKYKCHLCPYAAKCRANLNQHLTVHSVKLVSTDTEDIVSAVTSEGSDGKKHPYYYSCHVCGFETELNVQFVSHMSLHVDKEQWMFSICCTACDFVTMEEAEIKTHIGTKHTGEDRKTPSESNSPSSSSLSALSDSANSKDDSDGSQKNKGGNNLLVISVMPGSQPSLNSEEKPEKGFECVFCNFVCKTKNMFERHLQIHLITRMFECDVCHKFMKTPEQLLEHKKCHTVPTGGLK

SEQ ID NO: 965 - protein, 1185 aa, Homo sapiens
MADGGEREELLSPSPVSPAKRQCSWPSPQAHHPRGSPGAAGGGAGGVGSSCLVLGARPHLQPDSLLDCAAKTVAEKWAYERVEERFERIPEPVQRRIVYWSFPRNEREICMYSSFQYRGGPGAGAAGGAAGASPAEEGPQPPPGAAAPAGSAPGGVAAGASPGLGAGAGAAGCGGEGLPFRRGIRLLDSGSVENVLQVGFHLSGTVTELATASEPAVTYKVAISFDRCKITSVTCGCGNKDIFYCAHVVALSLYRIRKPDQVKLRLPISETLFQMNRDQLQKFIQYLITAHHTEVLPTAQKLADEILSSNSEINQVNGAPDPTAGASIDDENCWHLDEEQVKEQVKLFLSQGGYCGSGKQLNSMFAKVREMLRMRDSNGARMLTLITEQFVADPRLTLWRQQGTNMTDKCRQLWDELGALWVCIILNPHCKLEEKSCWLQQLQKWSDLDVCPLEDGNYGHELPNITNALPQSAIHSPDSLSRPRRTVFTRAIEGRELHWQDSHLQRIISSDVYTAPACQRESERLLFNSQGQPLWLEHVPTACARVDALRSHGYPKEALRLTVAIINTLRLQQQRQLEIYKHQKKELLQRGTTTITNLEGWVGHPLDPIDCLFLTLTEACRLNDDGYLEMSDMNESRPPVYQHVPVAAGSPNSSESYLSLALEVALMGLGQQRLMPEGLYAQDKVCRNEEQLLSQLQELQLDDELVQTLQKQCILLLEGGPFSGLGEVIHRESVPMHTFAKYLFSALLPHDPDLSYKLALRAMRLPVLENSASAGDTSHPHHMVSVVPSRYPRWFTLGHLESQQCELASTMLTAAKGDTLRLRTILEAIQKHIHSSSLIFKLAQDAFKIATPTDSSTDSTLLNVALELGLQVMRMTLSTLNWRRREMVRWLVTCATEVGVRALVSILQSWYTLFTPTEATSIVAATAVSHTTILRLSLDYPQREELASCARTLALQCAMKDPQSCALSALTLCEKDHIAFEAAYQIAIDAAAGGMTHSQLFTIARYMELRGYPLRAFKLASLAMSHLNLAYNQDTHPAINDVLWACALSHSLGKNELAALIPLVVKSVHCATVLSDILRRCTVTAPGLAGIPGRRSSGKLMSTDKAPLRQLLDATINAYINTTHSRLTHISPRHYGEFIEFLSKARETFLLPQDGHLQFAQFIDNLKQIYKGKKKLMLLVRERFG

SEQ ID NO: 966 - protein, 591 aa, Homo sapiens
MWERLNCAAEDFYSRLLQKFNEEKKGIRKDPFLYEADVQVQLISKGQPNPLKNILNENDIVFIVEKVPLEKEETSHIEELQSEETAISDFSTGENVGPLALPVGKARQLIGLYTMAHNPNMTHLKINLPVTALPPLWVRCDSSDPEGTCWLGAELITTNNSITGIVLYVVSCKADKNYSVNLENLKNLHKKRHHLSTVTSKGFAQYELFKSSALDDTITASQTAIALDISWSPVDEILQIPPLSSTATLNIKVESGEPRGPLNHLYRELKFLLVLADGLRTGVTEWLEPLEAKSAVELVQEFLNDLNKLDGFGDSTKKDTEVETLKHDTAAVDRSVKRLFKVRSDLDFAEQLWCKMSSSVISYQDLVKCFTLIIQSLQRGDIQPWLHSGSNSLLSKLIHQSYHGTMDTVSLSGTIPVQMLLEIGLDKLKKDYISFFIGQELASLNHLEYFIAPSVDIQEQVYRVQKLHHILEILVSCMPFIKSQHELLFSLTQICIKYYKQNPLDEQHIFQLPVRPTAVKNLYQSEKPQKWRVEIYSGQKKIKTVWQLSDSSPIDHLNFHKPDFSELTLNGSLEERIFFTNMVTCSQVHFK

SEQ ID NO: 967 - protein, 418 aa, Homo sapiens; identical to SEQ ID NO: 720

SEQ ID NO: 968 - DNA, 8 bp, Artificial Sequence
  Description of Artificial Sequence: Synthetic oligonucleotide
acacacac

SEQ ID NO: 969 - DNA, 8 bp, Artificial Sequence
  Description of Artificial Sequence: Synthetic oligonucleotide
acatacac

SEQ ID NO: 970 - DNA, 8 bp, Artificial Sequence
  Description of Artificial Sequence: Synthetic oligonucleotide
atacacac

SEQ ID NO: 971 - DNA, 8 bp, Artificial Sequence
  Description of Artificial Sequence: Synthetic oligonucleotide
atatacac

SEQ ID NO: 972 - DNA, 8 bp, Artificial Sequence
  Description of Artificial Sequence: Synthetic oligonucleotide
acgcacac

SEQ ID NO: 973 - DNA, 8 bp, Artificial Sequence
  Description of Artificial Sequence: Synthetic oligonucleotide
acgtacac

SEQ ID NO: 974 - DNA, 8 bp, Artificial Sequence
  Description of Artificial Sequence: Synthetic oligonucleotide
atgcacac

SEQ ID NO: 975 - DNA, 8 bp, Artificial Sequence
  Description of Artificial Sequence: Synthetic oligonucleotide
atgtacac

SEQ ID NO: 976 - DNA, 8 bp, Artificial Sequence
  Description of Artificial Sequence: Synthetic oligonucleotide
hyrydcay

SEQ ID NO: 977 - DNA, 8 bp, Artificial Sequence
  Description of Artificial Sequence: Synthetic oligonucleotide
ccaaacac

SEQ ID NO: 978 - DNA, 8 bp, Artificial Sequence
  Description of Artificial Sequence: Synthetic oligonucleotide
gattacag

1. A method of treating a subject with a neurological disease comprising identifying the subject comprising a splicing defect in an autism spectrum disorder (ASD)-associated gene, said target gene being characterized as having an hnRNP L binding site, and administering to said subject a spliceopathy rescue agent to repair said splicing defect, wherein said ASD-associated gene does not comprise AB11, ACSS2, AGAP3, AGXT2L2, APP, ATP2B1, ATP2B4, BIN1, BPTF/FALZ, C12orf41/KANSL2, C14orf133/VIPAR, DMD, DTNA, E1F2C2, EPB41L2, FMNL2, GARNL1/RALGAPA1, ITSN2, KIAA1217, LRRFIP1, MAPT, MAX, MEF2A, NCAM1, PALLD, PDLIM7, PPP2R5C, PTPN3, RPGR, RRN3, SAD1/BRSK2, SAMD4A, SEMA6D, SLC25A3, SLC39A9, SMTN, SORBS1, STXBP5, SVIL, TPM1, TPM3, TRIM66, TTN, VPS29, XPNPEP1, or ZMYND8.

2. The method of claim 1, wherein said subject is from a cohort with neurofibromatosis comprising a splicing defect in a NF1 gene or tuberous sclerosis comprising a splicing defect in a TSC1 or TSC2 gene.

3. The method of claim 1, wherein said splicing defect is in a target gene associated with ASD within the SHANK/TSC/mTOR/ERK signaling pathway.

4. The method of claim 3, wherein said target gene associated with ASD within the SHANK/TSC/mTOR signaling pathway is selected from the group consisting of CADPS2, NRXN1, NRXN2, NRXN3, NLGN3, NLGN4X, NLGN4Y, SHANK2, SHANK3, NF1, TSC1, TSC2, FMR1, EIF4E, CACNA1C, MTOR, GRIN1 and GRM1.

5. The method of claim 1, wherein said gene is characterized as having an hnRNP L binding site within the intron, or within the exon, adjacent to a site of alternative splicing.

6. The method of claim 1, wherein said gene is characterized as having an hnRNP L binding site within 500 base pairs of a site of alternative splicing.

7. The method of claim 1, wherein said gene further comprises an hnRNP binding site within 200 base pairs of an RBFox1/A2BP1 binding site.

8. The method of claim 1, wherein said gene further comprises an hnRNP binding site within 200 base pairs of the binding site of a splicing factor which is partner of hnRNP L in the splicing complex.

9. The method of claim 1, wherein said subject comprises a splice defect in an ASD-associated gene listed in Table 1, wherein said ASD-associated gene is a target of hnRNP L.

10. The method of claim 1, wherein said subject comprises a mutation in the target gene which results in spliceopathy.

11. The method of claim 1, wherein said splicing defect is in a gene selected from genes listed in Tables 2, 3, or 4.

12. The method of claim 1, wherein said splicing defect is in a gene selected from genes listed in Table 5.

13. The method of claim 1, wherein said splicing defect is in a gene selected from genes listed in Table 6.

14. The method of claim 1, wherein said subject comprises (a) social communication and social interactions characterized by deficits in social emotional reciprocity; deficits in non-verbal communication; and deficits in developing, maintaining and understanding relationships; and (b) restricted and repetitive behavior characterized by at least 2 of stereotyped movement or speech; insistence on sameness, routines, rituals; restricted, fixated interests; and atypical sensory reactivity.

15. A method of claim 1, wherein the spliceopathy rescue agent is one selected from a small molecule, a nucleic acid, an enzyme, a protein, a polypeptide, an antibody or a functional fragment thereof, an aptamer, a small interfering RNA, a microRNA, a small hairpin RNA, an antisense nucleic acid, and a PNA.

16. The method of claim 15, wherein said small molecule comprises ascochlorin, an ascochlorin derivative, or an ascochlorin analogue.

17. The method of claim 16, wherein said ascochlorin analogue comprises ascofuranone, an ascofuranone derivative or an ascofuranone analog.

18.-47. (canceled)

48. A method of identifying a subject suffering from or at risk of developing ASD or developing intellectual disability comprising
i) detecting a defect in an hnRNP L gene or mRNA or protein in a tissue or a cell of the subject;
ii) contacting a tissue or a bodily fluid sample from said subject with an hnRNP L binding agent and a detectable label to form a complex and measuring an amount of the complex; or
iii) detecting a defect in an ASD-associated gene or in the mRNA or protein of said gene in a tissue or a cell of the subject, said ASD-associated gene being characterized as having an hnRNP L binding site.

49.-55. (canceled)

56. A composition comprising a spliceopathy rescue agent for treating a subject with a neurological disease, wherein the composition repairs a splicing defect in an ASD-associated gene, wherein said target gene is characterized as having an hnRNP L binding site, and said ASD-associated gene does not comprise AB11, ACSS2, AGAP3, AGXT2L2, APP, ATP2B1, ATP2B4, BIN1, BPTF/FALZ, C12orf41/KANSL2, C14orf133/VIPAR, DMD, DTNA, ElF2C2, EPB41L2, FMNL2, GARNL1/RALGAPA1, ITSN2, KIAA1217, LRRFIP1, MAPT, MAX, MEF2A, NCAM1, PALLD, PDLIM7, PPP2R5C, PTPN3, RPGR, RRN3, SAD1/BRSK2, SAMD4A, SEMA6D, SLC25A3, SLC39A9, SMTN, SORBS1, STXBP5, SVIL, TPM1, TPM3, TRIM66, TTN, VPS29, XPNPEP1, or ZMYND8.

57.-79. (canceled)
